United States Patent Application Publication US 2026/0286329 A1 - sequence listing, part 2

SEQ ID NO: 2600 - DNA, 7561 bp, synthetic construct
  misc_feature 1..7561: note = Synthetic
  source 1..7561: mol_type = other DNA
aggtgttcaaccagagtgaaaccactaacgggtcagagccccaagctcagaataaacgctcaactttggccggatctgccaccatgaagcggcccgccgccaccaagaaggccggccaggccaagaagaagaaggacaagaagtactccatcggcctggacatcggcaccaactccgtgggctgggccgtgatcaccgacgagtacaaggtgccctccaagaagttcaaggtgctgggcaacaccgaccggcactccatcaagaagaacctgatcggcgccctgctgttcgactccggcgagaccgccgaggccacccggctgaagcggaccgcccggcggcggtacacccggcggaagaaccggatctgctacctgcaggagatcttctccaacgagatggccaaggtggacgactccttcttccaccggctggaggagtccttcctggtggaggaggacaagaagcacgagcggcaccccatcttcggcaacatcgtggacgaggtggcctaccacgagaagtaccccaccatctaccacctgcggaagaagctggtggactccaccgacaaggccgacctgcggctgatctacctggccctggcccacatgatcaagttccggggccacttcctgatcgagggcgacctgaaccccgacaactccgacgtggacaagctgttcatccagctggtgcagacctacaaccagctgttcgaggagaaccccatcaacgcctccggcgtggacgccaaggccatcctgtccgcccggctgtccaagtcccggcggctggagaacctgatcgcccagctgcccggcgagaagaagaacggcctgttcggcaacctgatcgccctgtccctgggcctgacccccaacttcaagtccaacttcgacctggccgaggacgccaagctgcagctgtccaaggacacctacgacgacgacctggacaacctgctggcccagatcggcgaccagtacgccgacctgttcctggccgccaagaacctgtccgacgccatcctgctgtccgacatcctgcgggtgaacaccgagatcaccaaggcccccctgtccgcctccatgatcaagcggtacgacgagcaccaccaggacctgaccctgctgaaggccctggtgcggcagcagctgcccgagaagtacaaggagatcttcttcgaccagtccaagaacggctacgccggctacatcgacggcggcgcctcccaggaggagttctacaagttcatcaagcccatcctggagaagatggacggcaccgaggagctgctggtgaagctgaaccgggaggacctgctgcggaagcagcggaccttcgacaacggctccatcccccaccagatccacctgggcgagctgcacgccatcctgcggcggcaggaggacttctaccccttcctgaaggacaaccgggagaagatcgagaagatcctgaccttccggatcccctactacgtgggccccctggcccggggcaactcccggttcgcctggatgacccggaagtccgaggagaccatcaccccctggaacttcgaggaggtggtggacaagggcgcctccgcccagtccttcatcgagcggatgaccaacttcgacaagaacctgcccaacgagaaggtgctgcccaagcactccctgctgtacgagtacttcaccgtgtacaacgagctgaccaaggtgaagtacgtgaccgagggcatgcggaagcccgccttcctgtccggcgagcagaagaaggccatcgtggacctgctgttcaagaccaaccggaaggtgaccgtgaagcagctgaaggaggactacttcaagaagatcgagtgcttcgactccgtggagatctccggcgtggaggaccggttcaacgcctccctgggcacctaccacgacctgctgaagatcatcaaggacaaggacttcctggacaacgaggagaacgaggacatcctggaggacatcgtgctgaccctgaccctgttcgaggaccgggagatgatcgaggagcggctgaagacctacgcccacctgttcgacgacaaggtgatgaagcagctgaagcggcggcggtacaccggctggggccggctgtcccggaagctgatcaacggcatccgggacaagcagtccggcaagaccatcctggacttcctgaagtccgacggcttcgccaaccggaacttcatgcagctgatccacgacgactccctgaccttcaaggaggacatccagaaggcccaggtgtccggccagggcgactccctgcacgagcacatcgccaacctggccggctcccccgccatcaagaagggcatcctgcagaccgtgaaggtggtggacgagctggtgaaggtgatgggccggcacaagcccgagaacatcgtgatcgagatggcccgggagaaccagaccacccagaagggccagaagaactcccgggagcggatgaagcggatcgaggagggcatcaaggagctgggctcccagatcctgaaggagcaccccgtggagaacacccagctgcagaacgagaagctgtacctgtactacctgcagaacggccgggacatgtacgtggaccaggagctggacatcaaccggctgtccgactacgacgtggacgccatcgtgccccagtccttcctgaaggacgactccatcgacaacaaggtgctgacccggtccgacaagaaccggggcaagtccgacaacgtgccctccgaggaggtggtgaagaagatgaagaactactggcggcagctgctgaacgccaagctgatcacccagcggaagttcgacaacctgaccaaggccgagcggggcggcctgtccgagctggacaaggccggcttcatcaagcggcagctggtggagacccggcagatcaccaagcacgtggcccagatcctggactcccggatgaacaccaagtacgacgagaacgacaagctgatccgggaggtgaaggtgatcaccctgaagtccaagctggtgtccgacttccggaaggacttccagttctacaaggtgcgggagatcaacaactaccaccacgcccacgacgcctacctgaacgccgtggtgggcaccgccctgatcaagaagtaccccaagctggagtccgagttcgtgtacggcgactacaaggtgtacgacgtgcggaagatgatcgccaagtccgagcaggagatcggcaaggccaccgccaagtacttcttctactccaacatcatgaacttcttcaagaccgagatcaccctggccaacggcgagatccggaagcggcccctgatcgagaccaacggcgagaccggcgagatcgtgtgggacaagggccgggacttcgccaccgtgcggaaggtgctgtccatgccccaggtgaacatcgtgaagaagaccgaggtgcagaccggcggcttctccaaggagtccatcctgcccaagcggaactccgacaagctgatcgcccggaagaaggactgggaccccaagaagtacggcggcttcgactcccccaccgtggcctactccgtgctggtggtggccaaggtggagaagggcaagtccaagaagctgaagtccgtgaaggagctgctgggcatcaccatcatggagcggtcctccttcgagaagaaccccatcgacttcctggaggccaagggctacaaggaggtgaagaaggacctgatcatcaagctgcccaagtactccctgttcgagctggagaacggccggaagcggatgctggcctccgccggcgagctgcagaagggcaacgagctggccctgccctccaagtacgtgaacttcctgtacctggcctcccactacgagaagctgaagggctcccccgaggacaacgagcagaagcagctgttcgtggagcagcacaagcactacctggacgagatcatcgagcagatctccgagttctccaagcgggtgatcctggccgacgccaacctggacaaggtgctgtccgcctacaacaagcaccgggacaagcccatccgggagcaggccgagaacatcatccacctgttcaccctgaccaacctgggcgcccccgccgccttcaagtacttcgacaccaccatcgaccggaagcggtacacctccaccaaggaggtgctggacgccaccctgatccaccagtccatcaccggcctgtacgagacccggatcgacctgtcccagctgggcggcgacggcgcccccgagtccgccaccgagtccggcggcacctccaccgagtccgagggctccgccggccccaagaagaagcggaaggtgacctccaccgagtccgagggctccgccggctccgccggctccacctccggctcctcctccggcatgaagatcgccgtggtggacaaggccctgaacaacacccggtacgacaagcacttccagctgtacggcgaggaggtggacgtgttccacatgtgcaacgagaagctgtccggccggctgctgaagaagcacatcaccatcggcacccccgagaaccccttcgaccccaacgactacgacttcgtgatcctggtgggcgccgagcccttcctgtacttcgccggcaagaagggcatcggcgactacaccggcaagcgggtggagtacaacggctacgccaactggatcgcctccatctcccccgcccagctgcacttcaagcccgagatgaagcccgtgttcgacgccaccgtggagaacatccacgacatcatcaacggccgggagaagatcgccaaggccggcgactaccggcccatcaccgaccccgacgaggccgaggagtacatcaagatggtgtacaacatggtgatcggccccgtggccttcgcctccgccacctccgccctgtactgccgggacggctacctgctgggcgtgtccatctcccaccaggagtaccagggcgtgtacatcgactccgactgcctgaccgaggtggccgtgtactacctgcagaagatcctggactccgagaaccacaccatcgtgttccacaacctgaagttcgacatgcacttctacaagtaccacctgggcctgaccttcgacaaggcccacaaggagcggcggctgcacgacaccatgctgcagcactacgtgctggacgagcggcggggcacccacggcctgaagtccctggccatgaagtacaccgacatgggcgactacgacttcgagctggacaagttcaaggacgactactgcaaggcccacaagatcaagaaggaggacttcacctacgacctgatccccttcgacatcatgtggccctacgccgccaaggacaccgacgccaccatccggctgcacaacttcttcctgcccaagatcgagaagaacgagaagctgtgctccctgtactacgacgtgctgatgcccggctgcgtgttcctgcagcgggtggaggaccggggcgtgcccatctccatcgaccggctgaaggaggcccagtaccagctgacccacaacctgaacaaggcccgggagaagctgtacacctaccccgaggtgaagcagctggagcaggaccagaacgaggccttcaaccccaactccgtgaagcagctgcgggtgctgctgttcgactacgtgggcctgacccccaccggcaagctgaccgacaccggcgccgactccaccgacgccgaggccctgaacgagctggccacccagcaccccatcgccaagaccctgctggagatccggaagctgaccaagctgatctccacctacgtggagaagatcctgctgtccatcgacgccgacggctgcatccggaccggcttccacgagcacatgaccacctccggccggctgtcctcctccggcaagctgaacctgcagcagctgccccgggacgagtccatcatcaagggctgcgtggtggccccccccggctaccgggtgatcgcctgggacctgaccaccgccgaggtgtactacgccgccgtgctgtccggcgaccggaacatgcagcaggtgttcatcaacatgcggaacgagcccgacaagtaccccgacttccactccaacatcgcccacatggtgttcaagctgcagtgcgagccccgggacgtgaagaagctgttccccgccctgcggcaggccgccaaggccatcaccttcggcatcctgtacggctccggccccgccaaggtggcccactccgtgaacgaggccctgctggagcaggccgccaagaccggcgagcccttcgtggagtgcaccgtggccgacgccaaggagtacatcgagacctacttcggccagttcccccagctgaagcggtggatcgacaagtgccacgaccagatcaagaaccacggcttcatctactcccacttcggccggaagcggcggctgcacaacatccactccgaggaccggggcgtgcagggcgaggagatccggtccggcttcaacgccatcatccagtccgcctcctccgactccctgctgctgggcgccgtggacgccgacaacgagatcatctccctgggcctggagcaggagatgaagatcgtgatgctggtgcacgactccgtggtggccatcgtgcgggaggacctgatcgaccagtacaacgagatcctgatccggaacatccagaaggaccggggcatctccatccccggctgccccatcggcatcgactccgactccgaggccggcggctcccgggactactcctgcggcaagatgaagaagcagcacccctccatcgcctgcatcgacgacgacgagtacacccggtacgtgaagggcgtgctgctggacgccgagttcgagtacaagaagctggccgccatggacaaggagcaccccgaccactccaagtacaaggacgacaagttcatcgccgtgtgcaaggacctggacaacgtgaagcggatcctgggcgccggcggcggctccggcaagcggaccgccgacggctccggcggcggctcccccaagaagaagcggaaggtgcctgccgctaagagagtgaagctggactagctagcaccagcctcaagaacacccgaatggagtctctaagctacataataccaacttacactttacaaaatgttgtcccccaaaatgtagccattcgtatctgctcctaataaaaagaaagtttcttcacattctctcgagaaaaaaaaaaaatggaaaaaaaaaaaacggaaaaaaaaaaaaggtaaaaaaaaaaaatataaaaaaaaaaaacataaaaaaaaaaaacgaaaaaaaaaaaacgtaaaaaaaaaaaactcaaaaaaaaaaaagataaaaaaaaaaaacctaaaaaaaaaaaatgtaaaaaaaaaaaagggaaaaaaaaaaaacgcaaaaaaaaaaaacacaaaaaaaaaaaatgcaaaaaaaaaaaatcgaaaaaaaaaaaatctaaaaaaaaaaaacgaaaaaaaaaaaacccaaaaaaaaaaaagacaaaaaaaaaaaatagaaaaaaaaaaagttaaaaaaaaaaaactgaaaaaaaaaaaatttaaaaaaaaaaaatctag

SEQ ID NO: 2601 - DNA, 7522 bp, synthetic construct
  misc_feature 1..7522: note = Synthetic
  source 1..7522: mol_type = other DNA
aggaagctcagaataaacgctcaactttggccggatctgccaccatgaagcggccggctgcgaccaagaaggctggtcaggctaagaagaagaaggacaagaagtactccatcggcctcgacatcgggacgaactccgtgggttgggcggtgatcaccgatgagtacaaggtcccgtccaagaaattcaaggtgctgggtaacaccgatcgacatagtatcaagaagaacctgatcggggccctcttgttcgacagcggcgagactgctgaggcgacgcgcttgaagaggacggcccggcgtcgatacacccgacgcaagaatcggatttgctatctccaggagatcttctccaacgagatggcaaaggtggacgactcgttcttccaccgcctcgaggagagctttctcgtcgaggaggacaagaagcacgagcgccaccccatattcgggaatatcgtggatgaggtcgcctatcacgagaagtaccccacgatttatcatttgcgcaagaagctggtagattcaaccgacaaggcggacttgcggttgatctacctagctcttgcgcatatgataaagtttcgggggcacttcttgattgaaggcgacctcaatcccgataactcggatgtggacaagctcttcatacagctggtgcagacctacaaccagctgtttgaagagaatccgattaatgcgtcgggtgtcgacgccaaggccatcctcagcgcgcgcctcagcaagtctcgccgccttgagaatctgattgcccagctcccgggcgagaagaagaacgggttgttcggtaaccttattgcgctgtcgcttggcctcactccgaacttcaagtcgaacttcgacttggcggaggacgccaagctgcagctcagtaaggatacctacgacgacgacctggacaatcttctcgcccagatcggcgaccagtacgccgatctcttcctggcggcgaagaatctgagcgatgcaattctcctgagtgacattctgagggtgaatactgaaattacgaaggctccgctgtctgccagcatgatcaagcggtacgatgagcatcaccaggacctgacgctcctcaaggctctcgtccgtcagcagctcccggagaagtacaaggagatcttcttcgaccagtcgaagaacggatacgccgggtacatcgacgggggcgcttcccaggaggagttttataagtttataaagcccatcctggagaagatggacgggaccgaggagctcctggtgaagctcaaccgcgaggatctgctgcgcaagcagcggaccttcgataatggcagtattccccatcagattcacttaggagagttgcacgcgattcttcgccgccaggaagacttctaccccttcctcaaagataacagggagaagatcgagaagatcctcaccttccgcatcccgtattacgtgggtcccctggcgcgggggaactcacgttttgcgtggatgacgcggaagagtgaggagacgatcactccctggaactttgaggaagtggtagacaagggtgcttcggcacagtccttcatcgagcggatgacaaattttgacaagaatttgccgaacgagaaggtcttgccgaagcactcgctgctttacgagtactttacggtttacaacgagttgacgaaggtcaagtacgtcactgagggaatgcggaagcccgcattcctcagtggcgaacagaagaaggccatcgtcgacttgttgttcaagacgaaccgtaaagtaaccgtgaagcagctgaaggaggactacttcaagaagatcgagtgcttcgactccgttgagatcagcggagtcgaagaccgatttaatgcctccctcggtacgtatcatgatctcctcaagattatcaaggataaggacttccttgataatgaggagaatgaggatattctcgaggacattgtgctgaccctcaccctgttcgaagaccgtgagatgattgaggaacggttgaagacctacgctcatctgtttgatgacaaggtcatgaagcagttgaagcgtaggcgttataccggctggggtcgtctttcccgaaagcttatcaacgggatccgtgataagcagtcgggaaagacgatcctagacttcctcaagtctgacggttttgcgaacaggaacttcatgcagctcatccacgacgactccttgaccttcaaggaggatatccagaaggcgcaggtgagcggccagggcgatagcttgcacgagcatatcgcgaacctggccggctcacctgcgatcaagaagggtatcctccagacggtcaaggtcgtggatgagctcgtgaaggtgatgggtcggcacaagcccgagaatatcgtcatcgagatggctcgcgagaatcagacgacccagaagggtcagaagaattctcgcgagcgcatgaagcgtatcgaggagggcattaaggagctgggcagtcagattctcaaggagcaccctgtcgagaacacgcagcttcagaacgagaagctgtatctttactacctccagaacggacgggacatgtacgtagatcaggagctggacatcaaccggctctctgactacgatgtcgatgctatcgtccctcagagctttctgaaggacgatagcatcgacaacaaggtcctgactcgctccgataagaatcggggcaagtcggacaatgtcccgtccgaggaggtagtgaagaagatgaagaactattggcgtcagctgttgaacgcgaagctgatcactcagagaaagttcgataatctcaccaaggccgagagggggggtctgagcgagcttgataaggcgggtttcatcaagcggcagcttgttgagacccgccagatcacgaagcacgtcgctcagatcctcgactctcggatgaacaccaagtacgacgagaatgacaagcttattcgggaggtcaaggtcattacccttaagtcgaagctcgtcagcgactttcgcaaggattttcagttttataaagttcgtgagataaacaattatcaccatgcccacgacgcgtacctgaacgccgtcgtgggcacggcgctgataaagaagtacccgaagctggagtccgagttcgtttatggcgattataaggtgtacgacgtgcgcaagatgatcgccaagagcgagcaggagatcggaaaggctacggcgaagtacttcttttacagcaacatcatgaacttttttaagactgagatcacccttgcgaatggcgagatccgcaagcgcccgttgatcgagacgaacggggagactggggagattgtgtgggataagggtcgggatttcgctacggtgagaaaggttctttcgatgccccaggtcaacatcgtcaagaagacggaggttcagaccgggggcttctcgaaagaatctatcttaccgaagcgaaattccgacaagcttatcgcacgcaagaaggactgggaccccaagaagtacggggggttcgacagtcctacggtggcctactccgtgttggtggtcgccaaggttgagaagggcaagagcaagaagctcaagtccgtcaaggagctcttggggatcaccatcatggagaggtcatcgtttgagaagaatcctattgacttccttgaagccaagggctacaaggaagtcaagaaggatttgatcatcaagctccccaagtactccctgttcgagctcgagaacgggcgcaagcggatgctcgccagcgctggcgagcttcagaagggtaatgagcttgccctcccgagtaagtatgtcaatttcttgtacttggcgtcgcactacgagaagctgaagggctcgccggaggacaacgagcagaagcagcttttcgtagagcagcacaagcactaccttgatgagattatcgagcagatctctgagttcagcaagcgcgttatactagctgacgccaatctcgacaaggtgctctcggcttataacaagcaccgggataagccgatacgtgagcaggcggagaacatcatccacctgttcacgttgacgaacttgggggccccggcagcgttcaagtattttgatactacgatcgatcggaagcgttacaccagcaccaaggaggtcttggacgcgaccttgattcatcagtcgatcacgggtctctacgagacccggatcgacctgtcgcagctcgggggcgacggcgcccccgagtctgcgacagagtcgggcgggacttccaccgagagtgaaggatcggccggccccaagaagaagcgcaaagtcacgtcgacggagtcggaggggtctgcggggtccgcggggagcacgtccggctcctcctcgggcatgaagatcgctgttgtcgataaggcgttgaacaatacgcgttacgacaagcattttcagctgtacggggaggaggtggacgtgttccatatgtgcaatgagaagctgagcggtcggcttctcaagaagcacataaccatcgggaccccggagaaccccttcgacccgaacgactatgactttgtgattcttgttggggccgagccgttcctttactttgcggggaagaaggggatcggggactataccggtaagcgtgtcgagtacaatggatacgctaactggatagcctcgatctcccccgcccagcttcatttcaagcctgagatgaagccggtcttcgacgcgaccgttgagaatatccacgatattatcaacggtcgcgagaagatcgcgaaggccggtgattaccgcccaatcacggatcccgacgaggccgaggagtacatcaagatggtgtacaacatggtgattgggcccgtggcgttcgcctccgctacgtcggcattgtattgtcgagacggctacctccttggggtgtcgatcagccaccaggagtaccaaggagtgtatatcgattcagattgtctgacggaggtggctgtctattatctgcagaagatattagacagcgagaaccacaccatcgtcttccacaatctgaagttcgatatgcacttctacaagtaccacctggggctgacgttcgacaaggcccacaaggagcgccgtctccacgatacaatgctccagcactacgtgctggacgagcggaggggaacccacgggctcaagagcctcgccatgaagtacaccgatatgggcgattacgatttcgaacttgataagttcaaggacgactattgtaaggcccataagatcaagaaggaggacttcacctacgacttgatcccttttgacatcatgtggccgtacgcagctaaggacaccgatgcgacgatcaggctgcacaacttctttcttccgaagatcgagaagaacgagaagttgtgcagcctgtattacgacgtgttgatgcctggctgcgtgttcctgcagcgcgttgaggaccgcggcgtgcccatcagcatcgatcgactgaaggaggcgcagtatcagctcacacataatctgaacaaggcacgggagaagctttacacttacccggaggttaagcagctcgagcaggaccagaacgaggcgtttaaccccaatagtgtgaagcagctccgcgtgctcttgttcgattatgtggggctgacgccgactggtaagcttacggatacaggagcggatagcacggatgctgaggcgctgaacgagttagcgactcagcatccgattgctaagacgctcctggagatccgtaagcttaccaagttgatctccacttatgtggagaagatccttctgtcgatcgatgctgatgggtgcatccggacggggtttcatgagcacatgaccacgtccgggcgcctcagcagtagtgggaagctgaaccttcagcagctcccacgcgatgagtcgataatcaaggggtgcgtggtcgcaccccctggttatcgagtcatcgcgtgggatctcactactgctgaggtgtactacgccgcggtcctcagcggcgacaggaacatgcagcaggtgttcatcaacatgcgtaatgagccggataagtatccggacttccacagcaacatcgcgcatatggtgttcaagctgcagtgcgagccacgtgatgtcaagaagctgtttccagcgcttcggcaggcggcgaaggccattacgttcggtatactctatggcagtgggccagcgaaggtggcccactccgtcaacgaggcactcctcgagcaggccgccaagactggcgagccgttcgtggagtgcaccgttgcggatgccaaggagtatatcgaaacgtactttggccagttcccgcagctgaagcgctggatagataaatgccatgatcagatcaagaatcatggctttatctacagccattttggtcgcaaacggcggcttcataatatccatagcgaggatcgcggagtccagggcgaagagattcgctctggattcaacgcgatcatccagagcgctagttccgactccctcctcctcggcgctgtcgatgccgacaacgagatcatcagtcttggtctcgagcaggagatgaagattgtgatgctcgtgcacgatagcgtggtcgctatcgtgcgtgaggatctcattgaccagtacaatgagatcctcattcggaacatccagaaggatcgagggatctcgatccctggatgtccgatcggcatcgacagcgactccgaggcaggagggagtcgggactacagctgtggaaagatgaagaagcagcacccttccatagcgtgtatagacgacgacgagtatacacgctatgtgaagggtgtgcttcttgatgccgagttcgagtacaagaagttggccgctatggataaggagcaccccgaccactccaagtataaggatgacaagtttatcgcggtctgcaaagacctcgataatgtcaaacgtatacttggagctggcgggggctccggcaagcgcaccgctgacggctccggggggggctctccgaagaagaagcggaaggtgcccgctgcgaagcgggtaaagcttgattgactagcaccagcctcaagaacacccgaatggagtctctaagctacataataccaacttacactttacaaaatgttgtcccccaaaatgtagccattcgtatctgctcctaataaaaagaaagtttcttcacattctctcgagaaaaaaaaaaaatggaaaaaaaaaaaacggaaaaaaaaaaaaggtaaaaaaaaaaaatataaaaaaaaaaaacataaaaaaaaaaaacgaaaaaaaaaaaacgtaaaaaaaaaaaactcaaaaaaaaaaaagataaaaaaaaaaaacctaaaaaaaaaaaatgtaaaaaaaaaaaagggaaaaaaaaaaaacgcaaaaaaaaaaaacacaaaaaaaaaaaatgcaaaaaaaaaaaatcgaaaaaaaaaaaatctaaaaaaaaaaaacgaaaaaaaaaaaacccaaaaaaaaaaaagacaaaaaaaaaaaatagaaaaaaaaaaagttaaaaaaaaaaaactgaaaaaaaaaaaatttaaaaaaaaaaaatctag

SEQ ID NO: 2602 - DNA, 7562 bp, synthetic construct
  misc_feature 1..7562: note = Synthetic
  source 1..7562: mol_type = other DNA
aggactcactatttgttttcgcgcccagttgcaaaaagtgtcgaagctcagaataaacgctcaactttggccggatctgccaccatgaagcggccggctgcgaccaagaaggctggtcaggctaagaagaagaaggacaagaagtactccatcggcctcgacatcgggacgaactccgtgggttgggcggtgatcaccgatgagtacaaggtcccgtccaagaaattcaaggtgctgggtaacaccgatcgacatagtatcaagaagaacctgatcggggccctcttgttcgacagcggcgagactgctgaggcgacgcgcttgaagaggacggcccggcgtcgatacacccgacgcaagaatcggatttgctatctccaggagatcttctccaacgagatggcaaaggtggacgactcgttcttccaccgcctcgaggagagctttctcgtcgaggaggacaagaagcacgagcgccaccccatattcgggaatatcgtggatgaggtcgcctatcacgagaagtaccccacgatttatcatttgcgcaagaagctggtagattcaaccgacaaggcggacttgcggttgatctacctagctcttgcgcatatgataaagtttcgggggcacttcttgattgaaggcgacctcaatcccgataactcggatgtggacaagctcttcatacagctggtgcagacctacaaccagctgtttgaagagaatccgattaatgcgtcgggtgtcgacgccaaggccatcctcagcgcgcgcctcagcaagtctcgccgccttgagaatctgattgcccagctcccgggcgagaagaagaacgggttgttcggtaaccttattgcgctgtcgcttggcctcactccgaacttcaagtcgaacttcgacttggcggaggacgccaagctgcagctcagtaaggatacctacgacgacgacctggacaatcttctcgcccagatcggcgaccagtacgccgatctcttcctggcggcgaagaatctgagcgatgcaattctcctgagtgacattctgagggtgaatactgaaattacgaaggctccgctgtctgccagcatgatcaagcggtacgatgagcatcaccaggacctgacgctcctcaaggctctcgtccgtcagcagctcccggagaagtacaaggagatcttcttcgaccagtcgaagaacggatacgccgggtacatcgacgggggcgcttcccaggaggagttttataagtttataaagcccatcctggagaagatggacgggaccgaggagctcctggtgaagctcaaccgcgaggatctgctgcgcaagcagcggaccttcgataatggcagtattccccatcagattcacttaggagagttgcacgcgattcttcgccgccaggaagacttctaccccttcctcaaagataacagggagaagatcgagaagatcctcaccttccgcatcccgtattacgtgggtcccctggcgcgggggaactcacgttttgcgtggatgacgcggaagagtgaggagacgatcactccctggaactttgaggaagtggtagacaagggtgcttcggcacagtccttcatcgagcggatgacaaattttgacaagaatttgccgaacgagaaggtcttgccgaagcactcgctgctttacgagtactttacggtttacaacgagttgacgaaggtcaagtacgtcactgagggaatgcggaagcccgcattcctcagtggcgaacagaagaaggccatcgtcgacttgttgttcaagacgaaccgtaaagtaaccgtgaagcagctgaaggaggactacttcaagaagatcgagtgcttcgactccgttgagatcagcggagtcgaagaccgatttaatgcctccctcggtacgtatcatgatctcctcaagattatcaaggataaggacttccttgataatgaggagaatgaggatattctcgaggacattgtgctgaccctcaccctgttcgaagaccgtgagatgattgaggaacggttgaagacctacgctcatctgtttgatgacaaggtcatgaagcagttgaagcgtaggcgttataccggctggggtcgtctttcccgaaagcttatcaacgggatccgtgataagcagtcgggaaagacgatcctagacttcctcaagtctgacggttttgcgaacaggaacttcatgcagctcatccacgacgactccttgaccttcaaggaggatatccagaaggcgcaggtgagcggccagggcgatagcttgcacgagcatatcgcgaacctggccggctcacctgcgatcaagaagggtatcctccagacggtcaaggtcgtggatgagctcgtgaaggtgatgggtcggcacaagcccgagaatatcgtcatcgagatggctcgcgagaatcagacgacccagaagggtcagaagaattctcgcgagcgcatgaagcgtatcgaggagggcattaaggagctgggcagtcagattctcaaggagcaccctgtcgagaacacgcagcttcagaacgagaagctgtatctttactacctccagaacggacgggacatgtacgtagatcaggagctggacatcaaccggctctctgactacgatgtcgatgctatcgtccctcagagctttctgaaggacgatagcatcgacaacaaggtcctgactcgctccgataagaatcggggcaagtcggacaatgtcccgtccgaggaggtagtgaagaagatgaagaactattggcgtcagctgttgaacgcgaagctgatcactcagagaaagttcgataatctcaccaaggccgagagggggggtctgagcgagcttgataaggcgggtttcatcaagcggcagcttgttgagacccgccagatcacgaagcacgtcgctcagatcctcgactctcggatgaacaccaagtacgacgagaatgacaagcttattcgggaggtcaaggtcattacccttaagtcgaagctcgtcagcgactttcgcaaggattttcagttttataaagttcgtgagataaacaattatcaccatgcccacgacgcgtacctgaacgccgtcgtgggcacggcgctgataaagaagtacccgaagctggagtccgagttcgtttatggcgattataaggtgtacgacgtgcgcaagatgatcgccaagagcgagcaggagatcggaaaggctacggcgaagtacttcttttacagcaacatcatgaacttttttaagactgagatcacccttgcgaatggcgagatccgcaagcgcccgttgatcgagacgaacggggagactggggagattgtgtgggataagggtcgggatttcgctacggtgagaaaggttctttcgatgccccaggtcaacatcgtcaagaagacggaggttcagaccgggggcttctcgaaagaatctatcttaccgaagcgaaattccgacaagcttatcgcacgcaagaaggactgggaccccaagaagtacggggggttcgacagtcctacggtggcctactccgtgttggtggtcgccaaggttgagaagggcaagagcaagaagctcaagtccgtcaaggagctcttggggatcaccatcatggagaggtcatcgtttgagaagaatcctattgacttccttgaagccaagggctacaaggaagtcaagaaggatttgatcatcaagctccccaagtactccctgttcgagctcgagaacgggcgcaagcggatgctcgccagcgctggcgagcttcagaagggtaatgagcttgccctcccgagtaagtatgtcaatttcttgtacttggcgtcgcactacgagaagctgaagggctcgccggaggacaacgagcagaagcagcttttcgtagagcagcacaagcactaccttgatgagattatcgagcagatctctgagttcagcaagcgcgttatactagctgacgccaatctcgacaaggtgctctcggcttataacaagcaccgggataagccgatacgtgagcaggcggagaacatcatccacctgttcacgttgacgaacttgggggccccggcagcgttcaagtattttgatactacgatcgatcggaagcgttacaccagcaccaaggaggtcttggacgcgaccttgattcatcagtcgatcacgggtctctacgagacccggatcgacctgtcgcagctcgggggcgacggcgcccccgagtctgcgacagagtcgggcgggacttccaccgagagtgaaggatcggccggccccaagaagaagcgcaaagtcacgtcgacggagtcggaggggtctgcggggtccgcggggagcacgtccggctcctcctcgggcatgaagatcgctgttgtcgataaggcgttgaacaatacgcgttacgacaagcattttcagctgtacggggaggaggtggacgtgttccatatgtgcaatgagaagctgagcggtcggcttctcaagaagcacataaccatcgggaccccggagaaccccttcgacccgaacgactatgactttgtgattcttgttggggccgagccgttcctttactttgcggggaagaaggggatcggggactataccggtaagcgtgtcgagtacaatggatacgctaactggatagcctcgatctcccccgcccagcttcatttcaagcctgagatgaagccggtcttcgacgcgaccgttgagaatatccacgatattatcaacggtcgcgagaagatcgcgaaggccggtgattaccgcccaatcacggatcccgacgaggccgaggagtacatcaagatggtgtacaacatggtgattgggcccgtggcgttcgcctccgctacgtcggcattgtattgtcgagacggctacctccttggggtgtcgatcagccaccaggagtaccaaggagtgtatatcgattcagattgtctgacggaggtggctgtctattatctgcagaagatattagacagcgagaaccacaccatcgtcttccacaatctgaagttcgatatgcacttctacaagtaccacctggggctgacgttcgacaaggcccacaaggagcgccgtctccacgatacaatgctccagcactacgtgctggacgagcggaggggaacccacgggctcaagagcctcgccatgaagtacaccgatatgggcgattacgatttcgaacttgataagttcaaggacgactattgtaaggcccataagatcaagaaggaggacttcacctacgacttgatcccttttgacatcatgtggccgtacgcagctaaggacaccgatgcgacgatcaggctgcacaacttctttcttccgaagatcgagaagaacgagaagttgtgcagcctgtattacgacgtgttgatgcctggctgcgtgttcctgcagcgcgttgaggaccgcggcgtgcccatcagcatcgatcgactgaaggaggcgcagtatcagctcacacataatctgaacaaggcacgggagaagctttacacttacccggaggttaagcagctcgagcaggaccagaacgaggcgtttaaccccaatagtgtgaagcagctccgcgtgctcttgttcgattatgtggggctgacgccgactggtaagcttacggatacaggagcggatagcacggatgctgaggcgctgaacgagttagcgactcagcatccgattgctaagacgctcctggagatccgtaagcttaccaagttgatctccacttatgtggagaagatccttctgtcgatcgatgctgatgggtgcatccggacggggtttcatgagcacatgaccacgtccgggcgcctcagcagtagtgggaagctgaaccttcagcagctcccacgcgatgagtcgataatcaaggggtgcgtggtcgcaccccctggttatcgagtcatcgcgtgggatctcactactgctgaggtgtactacgccgcggtcctcagcggcgacaggaacatgcagcaggtgttcatcaacatgcgtaatgagccggataagtatccggacttccacagcaacatcgcgcatatggtgttcaagctgcagtgcgagccacgtgatgtcaagaagctgtttccagcgcttcggcaggcggcgaaggccattacgttcggtatactctatggcagtgggccagcgaaggtggcccactccgtcaacgaggcactcctcgagcaggccgccaagactggcgagccgttcgtggagtgcaccgttgcggatgccaaggagtatatcgaaacgtactttggccagttcccgcagctgaagcgctggatagataaatgccatgatcagatcaagaatcatggctttatctacagccattttggtcgcaaacggcggcttcataatatccatagcgaggatcgcggagtccagggcgaagagattcgctctggattcaacgcgatcatccagagcgctagttccgactccctcctcctcggcgctgtcgatgccgacaacgagatcatcagtcttggtctcgagcaggagatgaagattgtgatgctcgtgcacgatagcgtggtcgctatcgtgcgtgaggatctcattgaccagtacaatgagatcctcattcggaacatccagaaggatcgagggatctcgatccctggatgtccgatcggcatcgacagcgactccgaggcaggagggagtcgggactacagctgtggaaagatgaagaagcagcacccttccatagcgtgtatagacgacgacgagtatacacgctatgtgaagggtgtgcttcttgatgccgagttcgagtacaagaagttggccgctatggataaggagcaccccgaccactccaagtataaggatgacaagtttatcgcggtctgcaaagacctcgataatgtcaaacgtatacttggagctggcgggggctccggcaagcgcaccgctgacggctccggggggggctctccgaagaagaagcggaaggtgcccgctgcgaagcgggtaaagcttgattgactagcaccagcctcaagaacacccgaatggagtctctaagctacataataccaacttacactttacaaaatgttgtcccccaaaatgtagccattcgtatctgctcctaataaaaagaaagtttcttcacattctctcgagaaaaaaaaaaaatggaaaaaaaaaaaacggaaaaaaaaaaaaggtaaaaaaaaaaaatataaaaaaaaaaaacataaaaaaaaaaaacgaaaaaaaaaaaacgtaaaaaaaaaaaactcaaaaaaaaaaaagataaaaaaaaaaaacctaaaaaaaaaaaatgtaaaaaaaaaaaagggaaaaaaaaaaaacgcaaaaaaaaaaaacacaaaaaaaaaaaatgcaaaaaaaaaaaatcgaaaaaaaaaaaatctaaaaaaaaaaaacgaaaaaaaaaaaacccaaaaaaaaaaaagacaaaaaaaaaaaatagaaaaaaaaaaagttaaaaaaaaaaaactgaaaaaaaaaaaatttaaaaaaaaaaaatctag

SEQ ID NO: 2603 - DNA, 7616 bp, synthetic construct
  misc_feature 1..7616: note = Synthetic
  source 1..7616: mol_type = other DNA
aggaagctcagaataaacgctcaactttggccggatctgccaccatgaagcggccggctgcgaccaagaaggctggtcaggctaagaagaagaaggacaagaagtactccatcggcctcgacatcgggacgaactccgtgggttgggcggtgatcaccgatgagtacaaggtcccgtccaagaaattcaaggtgctgggtaacaccgatcgacatagtatcaagaagaacctgatcggggccctcttgttcgacagcggcgagactgctgaggcgacgcgcttgaagaggacggcccggcgtcgatacacccgacgcaagaatcggatttgctatctccaggagatcttctccaacgagatggcaaaggtggacgactcgttcttccaccgcctcgaggagagctttctcgtcgaggaggacaagaagcacgagcgccaccccatattcgggaatatcgtggatgaggtcgcctatcacgagaagtaccccacgatttatcatttgcgcaagaagctggtagattcaaccgacaaggcggacttgcggttgatctacctagctcttgcgcatatgataaagtttcgggggcacttcttgattgaaggcgacctcaatcccgataactcggatgtggacaagctcttcatacagctggtgcagacctacaaccagctgtttgaagagaatccgattaatgcgtcgggtgtcgacgccaaggccatcctcagcgcgcgcctcagcaagtctcgccgccttgagaatctgattgcccagctcccgggcgagaagaagaacgggttgttcggtaaccttattgcgctgtcgcttggcctcactccgaacttcaagtcgaacttcgacttggcggaggacgccaagctgcagctcagtaaggatacctacgacgacgacctggacaatcttctcgcccagatcggcgaccagtacgccgatctcttcctggcggcgaagaatctgagcgatgcaattctcctgagtgacattctgagggtgaatactgaaattacgaaggctccgctgtctgccagcatgatcaagcggtacgatgagcatcaccaggacctgacgctcctcaaggctctcgtccgtcagcagctcccggagaagtacaaggagatcttcttcgaccagtcgaagaacggatacgccgggtacatcgacgggggcgcttcccaggaggagttttataagtttataaagcccatcctggagaagatggacgggaccgaggagctcctggtgaagctcaaccgcgaggatctgctgcgcaagcagcggaccttcgataatggcagtattccccatcagattcacttaggagagttgcacgcgattcttcgccgccaggaagacttctaccccttcctcaaagataacagggagaagatcgagaagatcctcaccttccgcatcccgtattacgtgggtcccctggcgcgggggaactcacgttttgcgtggatgacgcggaagagtgaggagacgatcactccctggaactttgaggaagtggtagacaagggtgcttcggcacagtccttcatcgagcggatgacaaattttgacaagaatttgccgaacgagaaggtcttgccgaagcactcgctgctttacgagtactttacggtttacaacgagttgacgaaggtcaagtacgtcactgagggaatgcggaagcccgcattcctcagtggcgaacagaagaaggccatcgtcgacttgttgttcaagacgaaccgtaaagtaaccgtgaagcagctgaaggaggactacttcaagaagatcgagtgcttcgactccgttgagatcagcggagtcgaagaccgatttaatgcctccctcggtacgtatcatgatctcctcaagattatcaaggataaggacttccttgataatgaggagaatgaggatattctcgaggacattgtgctgaccctcaccctgttcgaagaccgtgagatgattgaggaacggttgaagacctacgctcatctgtttgatgacaaggtcatgaagcagttgaagcgtaggcgttataccggctggggtcgtctttcccgaaagcttatcaacgggatccgtgataagcagtcgggaaagacgatcctagacttcctcaagtctgacggttttgcgaacaggaacttcatgcagctcatccacgacgactccttgaccttcaaggaggatatccagaaggcgcaggtgagcggccagggcgatagcttgcacgagcatatcgcgaacctggccggctcacctgcgatcaagaagggtatcctccagacggtcaaggtcgtggatgagctcgtgaaggtgatgggtcggcacaagcccgagaatatcgtcatcgagatggctcgcgagaatcagacgacccagaagggtcagaagaattctcgcgagcgcatgaagcgtatcgaggagggcattaaggagctgggcagtcagattctcaaggagcaccctgtcgagaacacgcagcttcagaacgagaagctgtatctttactacctccagaacggacgggacatgtacgtagatcaggagctggacatcaaccggctctctgactacgatgtcgatgctatcgtccctcagagctttctgaaggacgatagcatcgacaacaaggtcctgactcgctccgataagaatcggggcaagtcggacaatgtcccgtccgaggaggtagtgaagaagatgaagaactattggcgtcagctgttgaacgcgaagctgatcactcagagaaagttcgataatctcaccaaggccgagagggggggtctgagcgagcttgataaggcgggtttcatcaagcggcagcttgttgagacccgccagatcacgaagcacgtcgctcagatcctcgactctcggatgaacaccaagtacgacgagaatgacaagcttattcgggaggtcaaggtcattacccttaagtcgaagctcgtcagcgactttcgcaaggattttcagttttataaagttcgtgagataaacaattatcaccatgcccacgacgcgtacctgaacgccgtcgtgggcacggcgctgataaagaagtacccgaagctggagtccgagttcgtttatggcgattataaggtgtacgacgtgcgcaagatgatcgccaagagcgagcaggagatcggaaaggctacggcgaagtacttcttttacagcaacatcatgaacttttttaagactgagatcacccttgcgaatggcgagatccgcaagcgcccgttgatcgagacgaacggggagactggggagattgtgtgggataagggtcgggatttcgctacggtgagaaaggttctttcgatgccccaggtcaacatcgtcaagaagacggaggttcagaccgggggcttctcgaaagaatctatcttaccgaagcgaaattccgacaagcttatcgcacgcaagaaggactgggaccccaagaagtacggggggttcgacagtcctacggtggcctactccgtgttggtggtcgccaaggttgagaagggcaagagcaagaagctcaagtccgtcaaggagctcttggggatcaccatcatggagaggtcatcgtttgagaagaatcctattgacttccttgaagccaagggctacaaggaagtcaagaaggatttgatcatcaagctccccaagtactccctgttcgagctcgagaacgggcgcaagcggatgctcgccagcgctggcgagcttcagaagggtaatgagcttgccctcccgagtaagtatgtcaatttcttgtacttggcgtcgcactacgagaagctgaagggctcgccggaggacaacgagcagaagcagcttttcgtagagcagcacaagcactaccttgatgagattatcgagcagatctctgagttcagcaagcgcgttatactagctgacgccaatctcgacaaggtgctctcggcttataacaagcaccgggataagccgatacgtgagcaggcggagaacatcatccacctgttcacgttgacgaacttgggggccccggcagcgttcaagtattttgatactacgatcgatcggaagcgttacaccagcaccaaggaggtcttggacgcgaccttgattcatcagtcgatcacgggtctctacgagacccggatcgacctgtcgcagctcgggggcgacggcgcccccgagtctgcgacagagtcgggcgggacttccaccgagagtgaaggatcggccggccccaagaagaagcgcaaagtcacgtcgacggagtcggaggggtctgcggggtccgcggggagcacgtccggctcctcctcgggcatgaagatcgctgttgtcgataaggcgttgaacaatacgcgttacgacaagcattttcagctgtacggggaggaggtggacgtgttccatatgtgcaatgagaagctgagcggtcggcttctcaagaagcacataaccatcgggaccccggagaaccccttcgacccgaacgactatgactttgtgattcttgttggggccgagccgttcctttactttgcggggaagaaggggatcggggactataccggtaagcgtgtcgagtacaatggatacgctaactggatagcctcgatctcccccgcccagcttcatttcaagcctgagatgaagccggtcttcgacgcgaccgttgagaatatccacgatattatcaacggtcgcgagaagatcgcgaaggccggtgattaccgcccaatcacggatcccgacgaggccgaggagtacatcaagatggtgtacaacatggtgattgggcccgtggcgttcgcctccgctacgtcggcattgtattgtcgagacggctacctccttggggtgtcgatcagccaccaggagtaccaaggagtgtatatcgattcagattgtctgacggaggtggctgtctattatctgcagaagatattagacagcgagaaccacaccatcgtcttccacaatctgaagttcgatatgcacttctacaagtaccacctggggctgacgttcgacaaggcccacaaggagcgccgtctccacgatacaatgctccagcactacgtgctggacgagcggaggggaacccacgggctcaagagcctcgccatgaagtacaccgatatgggcgattacgatttcgaacttgataagttcaaggacgactattgtaaggcccataagatcaagaaggaggacttcacctacgacttgatcccttttgacatcatgtggccgtacgcagctaaggacaccgatgcgacgatcaggctgcacaacttctttcttccgaagatcgagaagaacgagaagttgtgcagcctgtattacgacgtgttgatgcctggctgcgtgttcctgcagcgcgttgaggaccgcggcgtgcccatcagcatcgatcgactgaaggaggcgcagtatcagctcacacataatctgaacaaggcacgggagaagctttacacttacccggaggttaagcagctcgagcaggaccagaacgaggcgtttaaccccaatagtgtgaagcagctccgcgtgctcttgttcgattatgtggggctgacgccgactggtaagcttacggatacaggagcggatagcacggatgctgaggcgctgaacgagttagcgactcagcatccgattgctaagacgctcctggagatccgtaagcttaccaagttgatctccacttatgtggagaagatccttctgtcgatcgatgctgatgggtgcatccggacggggtttcatgagcacatgaccacgtccgggcgcctcagcagtagtgggaagctgaaccttcagcagctcccacgcgatgagtcgataatcaaggggtgcgtggtcgcaccccctggttatcgagtcatcgcgtgggatctcactactgctgaggtgtactacgccgcggtcctcagcggcgacaggaacatgcagcaggtgttcatcaacatgcgtaatgagccggataagtatccggacttccacagcaacatcgcgcatatggtgttcaagctgcagtgcgagccacgtgatgtcaagaagctgtttccagcgcttcggcaggcggcgaaggccattacgttcggtatactctatggcagtgggccagcgaaggtggcccactccgtcaacgaggcactcctcgagcaggccgccaagactggcgagccgttcgtggagtgcaccgttgcggatgccaaggagtatatcgaaacgtactttggccagttcccgcagctgaagcgctggatagataaatgccatgatcagatcaagaatcatggctttatctacagccattttggtcgcaaacggcggcttcataatatccatagcgaggatcgcggagtccagggcgaagagattcgctctggattcaacgcgatcatccagagcgctagttccgactccctcctcctcggcgctgtcgatgccgacaacgagatcatcagtcttggtctcgagcaggagatgaagattgtgatgctcgtgcacgatagcgtggtcgctatcgtgcgtgaggatctcattgaccagtacaatgagatcctcattcggaacatccagaaggatcgagggatctcgatccctggatgtccgatcggcatcgacagcgactccgaggcaggagggagtcgggactacagctgtggaaagatgaagaagcagcacccttccatagcgtgtatagacgacgacgagtatacacgctatgtgaagggtgtgcttcttgatgccgagttcgagtacaagaagttggccgctatggataaggagcaccccgaccactccaagtataaggatgacaagtttatcgcggtctgcaaagacctcgataatgtcaaacgtatacttggagctggcgggggctccggcaagcgcaccgctgacggctccggggggggctctccgaagaagaagcggaaggtgcccgctgcgaagcgggtaaagcttgattgactagcaccagcctcaagaacacccgaatggagtctctaagctacataataccaacttacactttacaaaatgttgtcccccaaaatgtagccattcgtatctgctcctaataaaaagaaagtttcttcacattcttgtcagcccagaaccccacacgagttttgccactgctaagctgtgaggcagtgcaggctgggacagccgacctccaggttgcgaaaaacctggtctcgagaaaaaaaaaaaatggaaaaaaaaaaaacggaaaaaaaaaaaaggtaaaaaaaaaaaatataaaaaaaaaaaacataaaaaaaaaaaacgaaaaaaaaaaaacgtaaaaaaaaaaaactcaaaaaaaaaaaagataaaaaaaaaaaacctaaaaaaaaaaaatgtaaaaaaaaaaaagggaaaaaaaaaaaacgcaaaaaaaaaaaacacaaaaaaaaaaaatgcaaaaaaaaaaaatcgaaaaaaaaaaaatctaaaaaaaaaaaacgaaaaaaaaaaaacccaaaaaaaaaaaagacaaaaaaaaaaaatagaaaaaaaaaaagttaaaaaaaaaaaactgaaaaaaaaaaaatttaaaaaaaaaaaatctag

SEQ ID NO: 2604 - DNA, 7656 bp, synthetic construct
  misc_feature 1..7656: note = Synthetic
  source 1..7656: mol_type = other DNA
aggactcactatttgttttcgcgcccagttgcaaaaagtgtcgaagctcagaataaacgctcaactttggccggatctgccaccatgaagcggccggctgcgaccaagaaggctggtcaggctaagaagaagaaggacaagaagtactccatcggcctcgacatcgggacgaactccgtgggttgggcggtgatcaccgatgagtacaaggtcccgtccaagaaattcaaggtgctgggtaacaccgatcgacatagtatcaagaagaacctgatcggggccctcttgttcgacagcggcgagactgctgaggcgacgcgcttgaagaggacggcccggcgtcgatacacccgacgcaagaatcggatttgctatctccaggagatcttctccaacgagatggcaaaggtggacgactcgttcttccaccgcctcgaggagagctttctcgtcgaggaggacaagaagcacgagcgccaccccatattcgggaatatcgtggatgaggtcgcctatcacgagaagtaccccacgatttatcatttgcgcaagaagctggtagattcaaccgacaaggcggacttgcggttgatctacctagctcttgcgcatatgataaagtttcgggggcacttcttgattgaaggcgacctcaatcccgataactcggatgtggacaagctcttcatacagctggtgcagacctacaaccagctgtttgaagagaatccgattaatgcgtcgggtgtcgacgccaaggccatcctcagcgcgcgcctcagcaagtctcgccgccttgagaatctgattgcccagctcccgggcgagaagaagaacgggttgttcggtaaccttattgcgctgtcgcttggcctcactccgaacttcaagtcgaacttcgacttggcggaggacgccaagctgcagctcagtaaggatacctacgacgacgacctggacaatcttctcgcccagatcggcgaccagtacgccgatctcttcctggcggcgaagaatctgagcgatgcaattctcctgagtgacattctgagggtgaatactgaaattacgaaggctccgctgtctgccagcatgatcaagcggtacgatgagcatcaccaggacctgacgctcctcaaggctctcgtccgtcagcagctcccggagaagtacaaggagatcttcttcgaccagtcgaagaacggatacgccgggtacatcgacgggggcgcttcccaggaggagttttataagtttataaagcccatcctggagaagatggacgggaccgaggagctcctggtgaagctcaaccgcgaggatctgctgcgcaagcagcggaccttcgataatggcagtattccccatcagattcacttaggagagttgcacgcgattcttcgccgccaggaagacttctaccccttcctcaaagataacagggagaagatcgagaagatcctcaccttccgcatcccgtattacgtgggtcccctggcgcgggggaactcacgttttgcgtggatgacgcggaagagtgaggagacgatcactccctggaactttgaggaagtggtagacaagggtgcttcggcacagtccttcatcgagcggatgacaaattttgacaagaatttgccgaacgagaaggtcttgccgaagcactcgctgctttacgagtactttacggtttacaacgagttgacgaaggtcaagtacgtcactgagggaatgcggaagcccgcattcctcagtggcgaacagaagaaggccatcgtcgacttgttgttcaagacgaaccgtaaagtaaccgtgaagcagctgaaggaggactacttcaagaagatcgagtgcttcgactccgttgagatcagcggagtcgaagaccgatttaatgcctccctcggtacgtatcatgatctcctcaagattatcaaggataaggacttccttgataatgaggagaatgaggatattctcgaggacattgtgctgaccctcaccctgttcgaagaccgtgagatgattgaggaacggttgaagacctacgctcatctgtttgatgacaaggtcatgaagcagttgaagcgtaggcgttataccggctggggtcgtctttcccgaaagcttatcaacgggatccgtgataagcagtcgggaaagacgatcctagacttcctcaagtctgacggttttgcgaacaggaacttcatgcagctcatccacgacgactccttgaccttcaaggaggatatccagaaggcgcaggtgagcggccagggcgatagcttgcacgagcatatcgcgaacctggccggctcacctgcgatcaagaagggtatcctccagacggtcaaggtcgtggatgagctcgtgaaggtgatgggtcggcacaagcccgagaatatcgtcatcgagatggctcgcgagaatcagacgacccagaagggtcagaagaattctcgcgagcgcatgaagcgtatcgaggagggcattaaggagctgggcagtcagattctcaaggagcaccctgtcgagaacacgcagcttcagaacgagaagctgtatctttactacctccagaacggacgggacatgtacgtagatcaggagctggacatcaaccggctctctgactacgatgtcgatgctatcgtccctcagagctttctgaaggacgatagcatcgacaacaaggtcctgactcgctccgataagaatcggggcaagtcggacaatgtcccgtccgaggaggtagtgaagaagatgaagaactattggcgtcagctgttgaacgcgaagctgatcactcagagaaagttcgataatctcaccaaggccgagagggggggtctgagcgagcttgataaggcgggtttcatcaagcggcagcttgttgagacccgccagatcacgaagcacgtcgctcagatcctcgactctcggatgaacaccaagtacgacgagaatgacaagcttattcgggaggtcaaggtcattacccttaagtcgaagctcgtcagcgactttcgcaaggattttcagttttataaagttcgtgagataaacaattatcaccatgcccacgacgcgtacctgaacgccgtcgtgggcacggcgctgataaagaagtacccgaagctggagtccgagttcgtttatggcgattataaggtgtacgacgtgcgcaagatgatcgccaagagcgagcaggagatcggaaaggctacggcgaagtacttcttttacagcaacatcatgaacttttttaagactgagatcacccttgcgaatggcgagatccgcaagcgcccgttgatcgagacgaacggggagactggggagattgtgtgggataagggtcgggatttcgctacggtgagaaaggttctttcgatgccccaggtcaacatcgtcaagaagacggaggttcagaccgggggcttctcgaaagaatctatcttaccgaagcgaaattccgacaagcttatcgcacgcaagaaggactgggaccccaagaagtacggggggttcgacagtcctacggtggcctactccgtgttggtggtcgccaaggttgagaagggcaagagcaagaagctcaagtccgtcaaggagctcttggggatcaccatcatggagaggtcatcgtttgagaagaatcctattgacttccttgaagccaagggctacaaggaagtcaagaaggatttgatcatcaagctccccaagtactccctgttcgagctcgagaacgggcgcaagcggatgctcgccagcgctggcgagcttcagaagggtaatgagcttgccctcccgagtaagtatgtcaatttcttgtacttggcgtcgcactacgagaagctgaagggctcgccggaggacaacgagcagaagcagcttttcgtagagcagcacaagcactaccttgatgagattatcgagcagatctctgagttcagcaagcgcgttatactagctgacgccaatctcgacaaggtgctctcggcttataacaagcaccgggataagccgatacgtgagcaggcggagaacatcatccacctgttcacgttgacgaacttgggggccccggcagcgttcaagtattttgatactacgatcgatcggaagcgttacaccagcaccaaggaggtcttggacgcgaccttgattcatcagtcgatcacgggtctctacgagacccggatcgacctgtcgcagctcgggggcgacggcgcccccgagtctgcgacagagtcgggcgggacttccaccgagagtgaaggatcggccggccccaagaagaagcgcaaagtcacgtcgacggagtcggaggggtctgcggggtccgcggggagcacgtccggctcctcctcgggcatgaagatcgctgttgtcgataaggcgttgaacaatacgcgttacgacaagcattttcagctgtacggggaggaggtggacgtgttccatatgtgcaatgagaagctgagcggtcggcttctcaagaagcacataaccatcgggaccccggagaaccccttcgacccgaacgactatgactttgtgattcttgttggggccgagccgttcctttactttgcggggaagaaggggatcggggactataccggtaagcgtgtcgagtacaatggatacgctaactggatagcctcgatctcccccgcccagcttcatttcaagcctgagatgaagccggtcttcgacgcgaccgttgagaatatccacgatattatcaacggtcgcgagaagatcgcgaaggccggtgattaccgcccaatcacggatcccgacgaggccgaggagtacatcaagatggtgtacaacatggtgattgggcccgtggcgttcgcctccgctacgtcggcattgtattgtcgagacggctacctccttggggtgtcgatcagccaccaggagtaccaaggagtgtatatcgattcagattgtctgacggaggtggctgtctattatctgcagaagatattagacagcgagaaccacaccatcgtcttccacaatctgaagttcgatatgcacttctacaagtaccacctggggctgacgttcgacaaggcccacaaggagcgccgtctccacgatacaatgctccagcactacgtgctggacgagcggaggggaacccacgggctcaagagcctcgccatgaagtacaccgatatgggcgattacgatttcgaacttgataagttcaaggacgactattgtaaggcccataagatcaagaaggaggacttcacctacgacttgatcccttttgacatcatgtggccgtacgcagctaaggacaccgatgcgacgatcaggctgcacaacttctttcttccgaagatcgagaagaacgagaagttgtgcagcctgtattacgacgtgttgatgcctggctgcgtgttcctgcagcgcgttgaggaccgcggcgtgcccatcagcatcgatcgactgaaggaggcgcagtatcagctcacacataatctgaacaaggcacgggagaagctttacacttacccggaggttaagcagctcgagcaggaccagaacgaggcgtttaaccccaatagtgtgaagcagctccgcgtgctcttgttcgattatgtggggctgacgccgactggtaagcttacggatacaggagcggatagcacggatgctgaggcgctgaacgagttagcgactcagcatccgattgctaagacgctcctggagatccgtaagcttaccaagttgatctccacttatgtggagaagatccttctgtcgatcgatgctgatgggtgcatccggacggggtttcatgagcacatgaccacgtccgggcgcctcagcagtagtgggaagctgaaccttcagcagctcccacgcgatgagtcgataatcaaggggtgcgtggtcgcaccccctggttatcgagtcatcgcgtgggatctcactactgctgaggtgtactacgccgcggtcctcagcggcgacaggaacatgcagcaggtgttcatcaacatgcgtaatgagccggataagtatccggacttccacagcaacatcgcgcatatggtgttcaagctgcagtgcgagccacgtgatgtcaagaagctgtttccagcgcttcggcaggcggcgaaggccattacgttcggtatactctatggcagtgggccagcgaaggtggcccactccgtcaacgaggcactcctcgagcaggccgccaagactggcgagccgttcgtggagtgcaccgttgcggatgccaaggagtatatcgaaacgtactttggccagttcccgcagctgaagcgctggatagataaatgccatgatcagatcaagaatcatggctttatctacagccattttggtcgcaaacggcggcttcataatatccatagcgaggatcgcggagtccagggcgaagagattcgctctggattcaacgcgatcatccagagcgctagttccgactccctcctcctcggcgctgtcgatgccgacaacgagatcatcagtcttggtctcgagcaggagatgaagattgtgatgctcgtgcacgatagcgtggtcgctatcgtgcgtgaggatctcattgaccagtacaatgagatcctcattcggaacatccagaaggatcgagggatctcgatccctggatgtccgatcggcatcgacagcgactccgaggcaggagggagtcgggactacagctgtggaaagatgaagaagcagcacccttccatagcgtgtatagacgacgacgagtatacacgctatgtgaagggtgtgcttcttgatgccgagttcgagtacaagaagttggccgctatggataaggagcaccccgaccactccaagtataaggatgacaagtttatcgcggtctgcaaagacctcgataatgtcaaacgtatacttggagctggcgggggctccggcaagcgcaccgctgacggctccggggggggctctccgaagaagaagcggaaggtgcccgctgcgaagcgggtaaagcttgattgactagcaccagcctcaagaacacccgaatggagtctctaagctacataataccaacttacactttacaaaatgttgtcccccaaaatgtagccattcgtatctgctcctaataaaaagaaagtttcttcacattcttgtcagcccagaaccccacacgagttttgccactgctaagctgtgaggcagtgcaggctgggacagccgacctccaggttgcgaaaaacctggtctcgagaaaaaaaaaaaatggaaaaaaaaaaaacggaaaaaaaaaaaaggtaaaaaaaaaaaatataaaaaaaaaaaacataaaaaaaaaaaacgaaaaaaaaaaaacgtaaaaaaaaaaaactcaaaaaaaaaaaagataaaaaaaaaaaacctaaaaaaaaaaaatgtaaaaaaaaaaaagggaaaaaaaaaaaacgcaaaaaaaaaaaacacaaaaaaaaaaaatgcaaaaaaaaaaaatcgaaaaaaaaaaaatctaaaaaaaaaaaacgaaaaaaaaaaaacccaaaaaaaaaaaagacaaaaaaaaaaaatagaaaaaaaaaaagttaaaaaaaaaaaactgaaaaaaaaaaaatttaaaaaaaaaaaatctag

SEQ ID NO: 2605 - DNA, 7612 bp, synthetic construct
  misc_feature 1..7612: note = Synthetic
  source 1..7612: mol_type = other DNA
aggactcactatttgttttcgcgcccagttgcaaaaagtgtcgaaaaaaaaaaaaccaaaaaaaaaaaacaaaaaaaaaaaataattgactaaaagctcagaataaacgctcaactttggccggatctgccaccatgaagcggccggctgcgaccaagaaggctggtcaggctaagaagaagaaggacaagaagtactccatcggcctcgacatcgggacgaactccgtgggttgggcggtgatcaccgatgagtacaaggtcccgtccaagaaattcaaggtgctgggtaacaccgatcgacatagtatcaagaagaacctgatcggggccctcttgttcgacagcggcgagactgctgaggcgacgcgcttgaagaggacggcccggcgtcgatacacccgacgcaagaatcggatttgctatctccaggagatcttctccaacgagatggcaaaggtggacgactcgttcttccaccgcctcgaggagagctttctcgtcgaggaggacaagaagcacgagcgccaccccatattcgggaatatcgtggatgaggtcgcctatcacgagaagtaccccacgatttatcatttgcgcaagaagctggtagattcaaccgacaaggcggacttgcggttgatctacctagctcttgcgcatatgataaagtttcgggggcacttcttgattgaaggcgacctcaatcccgataactcggatgtggacaagctcttcatacagctggtgcagacctacaaccagctgtttgaagagaatccgattaatgcgtcgggtgtcgacgccaaggccatcctcagcgcgcgcctcagcaagtctcgccgccttgagaatctgattgcccagctcccgggcgagaagaagaacgggttgttcggtaaccttattgcgctgtcgcttggcctcactccgaacttcaagtcgaacttcgacttggcggaggacgccaagctgcagctcagtaaggatacctacgacgacgacctggacaatcttctcgcccagatcggcgaccagtacgccgatctcttcctggcggcgaagaatctgagcgatgcaattctcctgagtgacattctgagggtgaatactgaaattacgaaggctccgctgtctgccagcatgatcaagcggtacgatgagcatcaccaggacctgacgctcctcaaggctctcgtccgtcagcagctcccggagaagtacaaggagatcttcttcgaccagtcgaagaacggatacgccgggtacatcgacgggggcgcttcccaggaggagttttataagtttataaagcccatcctggagaagatggacgggaccgaggagctcctggtgaagctcaaccgcgaggatctgctgcgcaagcagcggaccttcgataatggcagtattccccatcagattcacttaggagagttgcacgcgattcttcgccgccaggaagacttctaccccttcctcaaagataacagggagaagatcgagaagatcctcaccttccgcatcccgtattacgtgggtcccctggcgcgggggaactcacgttttgcgtggatgacgcggaagagtgaggagacgatcactccctggaactttgaggaagtggtagacaagggtgcttcggcacagtccttcatcgagcggatgacaaattttgacaagaatttgccgaacgagaaggtcttgccgaagcactcgctgctttacgagtactttacggtttacaacgagttgacgaaggtcaagtacgtcactgagggaatgcggaagcccgcattcctcagtggcgaacagaagaaggccatcgtcgacttgttgttcaagacgaaccgtaaagtaaccgtgaagcagctgaaggaggactacttcaagaagatcgagtgcttcgactccgttgagatcagcggagtcgaagaccgatttaatgcctccctcggtacgtatcatgatctcctcaagattatcaaggataaggacttccttgataatgaggagaatgaggatattctcgaggacattgtgctgaccctcaccctgttcgaagaccgtgagatgattgaggaacggttgaagacctacgctcatctgtttgatgacaaggtcatgaagcagttgaagcgtaggcgttataccggctggggtcgtctttcccgaaagcttatcaacgggatccgtgataagcagtcgggaaagacgatcctagacttcctcaagtctgacggttttgcgaacaggaacttcatgcagctcatccacgacgactccttgaccttcaaggaggatatccagaaggcgcaggtgagcggccagggcgatagcttgcacgagcatatcgcgaacctggccggctcacctgcgatcaagaagggtatcctccagacggtcaaggtcgtggatgagctcgtgaaggtgatgggtcggcacaagcccgagaatatcgtcatcgagatggctcgcgagaatcagacgacccagaagggtcagaagaattctcgcgagcgcatgaagcgtatcgaggagggcattaaggagctgggcagtcagattctcaaggagcaccctgtcgagaacacgcagcttcagaacgagaagctgtatctttactacctccagaacggacgggacatgtacgtagatcaggagctggacatcaaccggctctctgactacgatgtcgatgctatcgtccctcagagctttctgaaggacgatagcatcgacaacaaggtcctgactcgctccgataagaatcggggcaagtcggacaatgtcccgtccgaggaggtagtgaagaagatgaagaactattggcgtcagctgttgaacgcgaagctgatcactcagagaaagttcgataatctcaccaaggccgagagggggggtctgagcgagcttgataaggcgggtttcatcaagcggcagcttgttgagacccgccagatcacgaagcacgtcgctcagatcctcgactctcggatgaacaccaagtacgacgagaatgacaagcttattcgggaggtcaaggtcattacccttaagtcgaagctcgtcagcgactttcgcaaggattttcagttttataaagttcgtgagataaacaattatcaccatgcccacgacgcgtacctgaacgccgtcgtgggcacggcgctgataaagaagtacccgaagctggagtccgagttcgtttatggcgattataaggtgtacgacgtgcgcaagatgatcgccaagagcgagcaggagatcggaaaggctacggcgaagtacttcttttacagcaacatcatgaacttttttaagactgagatcacccttgcgaatggcgagatccgcaagcgcccgttgatcgagacgaacggggagactggggagattgtgtgggataagggtcgggatttcgctacggtgagaaaggttctttcgatgccccaggtcaacatcgtcaagaagacggaggttcagaccgggggcttctcgaaagaatctatcttaccgaagcgaaattccgacaagcttatcgcacgcaagaaggactgggaccccaagaagtacggggggttcgacagtcctacggtggcctactccgtgttggtggtcgccaaggttgagaagggcaagagcaagaagctcaagtccgtcaaggagctcttggggatcaccatcatggagaggtcatcgtttgagaagaatcctattgacttccttgaagccaagggctacaaggaagtcaagaaggatttgatcatcaagctccccaagtactccctgttcgagctcgagaacgggcgcaagcggatgctcgccagcgctggcgagcttcagaagggtaatgagcttgccctcccgagtaagtatgtcaatttcttgtacttggcgtcgcactacgagaagctgaagggctcgccggaggacaacgagcagaagcagcttttcgtagagcagcacaagcactaccttgatgagattatcgagcagatctctgagttcagcaagcgcgttatactagctgacgccaatctcgacaaggtgctctcggcttataacaagcaccgggataagccgatacgtgagcaggcggagaacatcatccacctgttcacgttgacgaacttgggggccccggcagcgttcaagtattttgatactacgatcgatcggaagcgttacaccagcaccaaggaggtcttggacgcgaccttgattcatcagtcgatcacgggtctctacgagacccggatcgacctgtcgcagctcgggggcgacggcgcccccgagtctgcgacagagtcgggcgggacttccaccgagagtgaaggatcggccggccccaagaagaagcgcaaagtcacgtcgacggagtcggaggggtctgcggggtccgcggggagcacgtccggctcctcctcgggcatgaagatcgctgttgtcgataaggcgttgaacaatacgcgttacgacaagcattttcagctgtacggggaggaggtggacgtgttccatatgtgcaatgagaagctgagcggtcggcttctcaagaagcacataaccatcgggaccccggagaaccccttcgacccgaacgactatgactttgtgattcttgttggggccgagccgttcctttactttgcggggaagaaggggatcggggactataccggtaagcgtgtcgagtacaatggatacgctaactggatagcctcgatctcccccgcccagcttcatttcaagcctgagatgaagccggtcttcgacgcgaccgttgagaatatccacgatattatcaacggtcgcgagaagatcgcgaaggccggtgattaccgcccaatcacggatcccgacgaggccgaggagtacatcaagatggtgtacaacatggtgattgggcccgtggcgttcgcctccgctacgtcggcattgtattgtcgagacggctacctccttggggtgtcgatcagccaccaggagtaccaaggagtgtatatcgattcagattgtctgacggaggtggctgtctattatctgcagaagatattagacagcgagaaccacaccatcgtcttccacaatctgaagttcgatatgcacttctacaagtaccacctggggctgacgttcgacaaggcccacaaggagcgccgtctccacgatacaatgctccagcactacgtgctggacgagcggaggggaacccacgggctcaagagcctcgccatgaagtacaccgatatgggcgattacgatttcgaacttgataagttcaaggacgactattgtaaggcccataagatcaagaaggaggacttcacctacgacttgatcccttttgacatcatgtggccgtacgcagctaaggacaccgatgcgacgatcaggctgcacaacttctttcttccgaagatcgagaagaacgagaagttgtgcagcctgtattacgacgtgttgatgcctggctgcgtgttcctgcagcgcgttgaggaccgcggcgtgcccatcagcatcgatcgactgaaggaggcgcagtatcagctcacacataatctgaacaaggcacgggagaagctttacacttacccggaggttaagcagctcgagcaggaccagaacgaggcgtttaaccccaatagtgtgaagcagctccgcgtgctcttgttcgattatgtggggctgacgccgactggtaagcttacggatacaggagcggatagcacggatgctgaggcgctgaacgagttagcgactcagcatccgattgctaagacgctcctggagatccgtaagcttaccaagttgatctccacttatgtggagaagatccttctgtcgatcgatgctgatgggtgcatccggacggggtttcatgagcacatgaccacgtccgggcgcctcagcagtagtgggaagctgaaccttcagcagctcccacgcgatgagtcgataatcaaggggtgcgtggtcgcaccccctggttatcgagtcatcgcgtgggatctcactactgctgaggtgtactacgccgcggtcctcagcggcgacaggaacatgcagcaggtgttcatcaacatgcgtaatgagccggataagtatccggacttccacagcaacatcgcgcatatggtgttcaagctgcagtgcgagccacgtgatgtcaagaagctgtttccagcgcttcggcaggcggcgaaggccattacgttcggtatactctatggcagtgggccagcgaaggtggcccactccgtcaacgaggcactcctcgagcaggccgccaagactggcgagccgttcgtggagtgcaccgttgcggatgccaaggagtatatcgaaacgtactttggccagttcccgcagctgaagcgctggatagataaatgccatgatcagatcaagaatcatggctttatctacagccattttggtcgcaaacggcggcttcataatatccatagcgaggatcgcggagtccagggcgaagagattcgctctggattcaacgcgatcatccagagcgctagttccgactccctcctcctcggcgctgtcgatgccgacaacgagatcatcagtcttggtctcgagcaggagatgaagattgtgatgctcgtgcacgatagcgtggtcgctatcgtgcgtgaggatctcattgaccagtacaatgagatcctcattcggaacatccagaaggatcgagggatctcgatccctggatgtccgatcggcatcgacagcgactccgaggcaggagggagtcgggactacagctgtggaaagatgaagaagcagcacccttccatagcgtgtatagacgacgacgagtatacacgctatgtgaagggtgtgcttcttgatgccgagttcgagtacaagaagttggccgctatggataaggagcaccccgaccactccaagtataaggatgacaagtttatcgcggtctgcaaagacctcgataatgtcaaacgtatacttggagctggcgggggctccggcaagcgcaccgctgacggctccggggggggctctccgaagaagaagcggaaggtgcccgctgcgaagcgggtaaagcttgattgactagcaccagcctcaagaacacccgaatggagtctctaagctacataataccaacttacactttacaaaatgttgtcccccaaaatgtagccattcgtatctgctcctaataaaaagaaagtttcttcacattctctcgagaaaaaaaaaaaatggaaaaaaaaaaaacggaaaaaaaaaaaaggtaaaaaaaaaaaatataaaaaaaaaaaacataaaaaaaaaaaacgaaaaaaaaaaaacgtaaaaaaaaaaaactcaaaaaaaaaaaagataaaaaaaaaaaacctaaaaaaaaaaaatgtaaaaaaaaaaaagggaaaaaaaaaaaacgcaaaaaaaaaaaacacaaaaaaaaaaaatgcaaaaaaaaaaaatcgaaaaaaaaaaaatctaaaaaaaaaaaacgaaaaaaaaaaaacccaaaaaaaaaaaagacaaaaaaaaaaaatagaaaaaaaaaaagttaaaaaaaaaaaactgaaaaaaaaaaaatttaaaaaaaaaaaatctag

SEQ ID NO: 2606 - DNA, 7561 bp, synthetic construct
  misc_feature 1..7561: note = Synthetic
  source 1..7561: mol_type = other DNA
aggtgttcaaccagagtgaaaccactaacgggtcagagccccaagctcagaataaacgctcaactttggccggatctgccaccatgaagcggccggctgcgaccaagaaggctggtcaggctaagaagaagaaggacaagaagtactccatcggcctcgacatcgggacgaactccgtgggttgggcggtgatcaccgatgagtacaaggtcccgtccaagaaattcaaggtgctgggtaacaccgatcgacatagtatcaagaagaacctgatcggggccctcttgttcgacagcggcgagactgctgaggcgacgcgcttgaagaggacggcccggcgtcgatacacccgacgcaagaatcggatttgctatctccaggagatcttctccaacgagatggcaaaggtggacgactcgttcttccaccgcctcgaggagagctttctcgtcgaggaggacaagaagcacgagcgccaccccatattcgggaatatcgtggatgaggtcgcctatcacgagaagtaccccacgatttatcatttgcgcaagaagctggtagattcaaccgacaaggcggacttgcggttgatctacctagctcttgcgcatatgataaagtttcgggggcacttcttgattgaaggcgacctcaatcccgataactcggatgtggacaagctcttcatacagctggtgcagacctacaaccagctgtttgaagagaatccgattaatgcgtcgggtgtcgacgccaaggccatcctcagcgcgcgcctcagcaagtctcgccgccttgagaatctgattgcccagctcccgggcgagaagaagaacgggttgttcggtaaccttattgcgctgtcgcttggcctcactccgaacttcaagtcgaacttcgacttggcggaggacgccaagctgcagctcagtaaggatacctacgacgacgacctggacaatcttctcgcccagatcggcgaccagtacgccgatctcttcctggcggcgaagaatctgagcgatgcaattctcctgagtgacattctgagggtgaatactgaaattacgaaggctccgctgtctgccagcatgatcaagcggtacgatgagcatcaccaggacctgacgctcctcaaggctctcgtccgtcagcagctcccggagaagtacaaggagatcttcttcgaccagtcgaagaacggatacgccgggtacatcgacgggggcgcttcccaggaggagttttataagtttataaagcccatcctggagaagatggacgggaccgaggagctcctggtgaagctcaaccgcgaggatctgctgcgcaagcagcggaccttcgataatggcagtattccccatcagattcacttaggagagttgcacgcgattcttcgccgccaggaagacttctaccccttcctcaaagataacagggagaagatcgagaagatcctcaccttccgcatcccgtattacgtgggtcccctggcgcgggggaactcacgttttgcgtggatgacgcggaagagtgaggagacgatcactccctggaactttgaggaagtggtagacaagggtgcttcggcacagtccttcatcgagcggatgacaaattttgacaagaatttgccgaacgagaaggtcttgccgaagcactcgctgctttacgagtactttacggtttacaacgagttgacgaaggtcaagtacgtcactgagggaatgcggaagcccgcattcctcagtggcgaacagaagaaggccatcgtcgacttgttgttcaagacgaaccgtaaagtaaccgtgaagcagctgaaggaggactacttcaagaagatcgagtgcttcgactccgttgagatcagcggagtcgaagaccgatttaatgcctccctcggtacgtatcatgatctcctcaagattatcaaggataaggacttccttgataatgaggagaatgaggatattctcgaggacattgtgctgaccctcaccctgttcgaagaccgtgagatgattgaggaacggttgaagacctacgctcatctgtttgatgacaaggtcatgaagcagttgaagcgtaggcgttataccggctggggtcgtctttcccgaaagcttatcaacgggatccgtgataagcagtcgggaaagacgatcctagacttcctcaagtctgacggttttgcgaacaggaacttcatgcagctcatccacgacgactccttgaccttcaaggaggatatccagaaggcgcaggtgagcggccagggcgatagcttgcacgagcatatcgcgaacctggccggctcacctgcgatcaagaagggtatcctccagacggtcaaggtcgtggatgagctcgtgaaggtgatgggtcggcacaagcccgagaatatcgtcatcgagatggctcgcgagaatcagacgacccagaagggtcagaagaattctcgcgagcgcatgaagcgtatcgaggagggcattaaggagctgggcagtcagattctcaaggagcaccctgtcgagaacacgcagcttcagaacgagaagctgtatctttactacctccagaacggacgggacatgtacgtagatcaggagctggacatcaaccggctctctgactacgatgtcgatgctatcgtccctcagagctttctgaaggacgatagcatcgacaacaaggtcctgactcgctccgataagaatcggggcaagtcggacaatgtcccgtccgaggaggtagtgaagaagatgaagaactattggcgtcagctgttgaacgcgaagctgatcactcagagaaagttcgataatctcaccaaggccgagagggggggtctgagcgagcttgataaggcgggtttcatcaagcggcagcttgttgagacccgccagatcacgaagcacgtcgctcagatcctcgactctcggatgaacaccaagtacgacgagaatgacaagcttattcgggaggtcaaggtcattacccttaagtcgaagctcgtcagcgactttcgcaaggattttcagttttataaagttcgtgagataaacaattatcaccatgcccacgacgcgtacctgaacgccgtcgtgggcacggcgctgataaagaagtacccgaagctggagtccgagttcgtttatggcgattataaggtgtacgacgtgcgcaagatgatcgccaagagcgagcaggagatcggaaaggctacggcgaagtacttcttttacagcaacatcatgaacttttttaagactgagatcacccttgcgaatggcgagatccgcaagcgcccgttgatcgagacgaacggggagactggggagattgtgtgggataagggtcgggatttcgctacggtgagaaaggttctttcgatgccccaggtcaacatcgtcaagaagacggaggttcagaccgggggcttctcgaaagaatctatcttaccgaagcgaaattccgacaagcttatcgcacgcaagaaggactgggaccccaagaagtacggggggttcgacagtcctacggtggcctactccgtgttggtggtcgccaaggttgagaagggcaagagcaagaagctcaagtccgtcaaggagctcttggggatcaccatcatggagaggtcatcgtttgagaagaatcctattgacttccttgaagccaagggctacaaggaagtcaagaaggatttgatcatcaagctccccaagtactccctgttcgagctcgagaacgggcgcaagcggatgctcgccagcgctggcgagcttcagaagggtaatgagcttgccctcccgagtaagtatgtcaatttcttgtacttggcgtcgcactacgagaagctgaagggctcgccggaggacaacgagcagaagcagcttttcgtagagcagcacaagcactaccttgatgagattatcgagcagatctctgagttcagcaagcgcgttatactagctgacgccaatctcgacaaggtgctctcggcttataacaagcaccgggataagccgatacgtgagcaggcggagaacatcatccacctgttcacgttgacgaacttgggggccccggcagcgttcaagtattttgatactacgatcgatcggaagcgttacaccagcaccaaggaggtcttggacgcgaccttgattcatcagtcgatcacgggtctctacgagacccggatcgacctgtcgcagctcgggggcgacggcgcccccgagtctgcgacagagtcgggcgggacttccaccgagagtgaaggatcggccggccccaagaagaagcgcaaagtcacgtcgacggagtcggaggggtctgcggggtccgcggggagcacgtccggctcctcctcgggcatgaagatcgctgttgtcgataaggcgttgaacaatacgcgttacgacaagcattttcagctgtacggggaggaggtggacgtgttccatatgtgcaatgagaagctgagcggtcggcttctcaagaagcacataaccatcgggaccccggagaaccccttcgacccgaacgactatgactttgtgattcttgttggggccgagccgttcctttactttgcggggaagaaggggatcggggactataccggtaagcgtgtcgagtacaatggatacgctaactggatagcctcgatctcccccgcccagcttcatttcaagcctgagatgaagccggtcttcgacgcgaccgttgagaatatccacgatattatcaacggtcgcgagaagatcgcgaaggccggtgattaccgcccaatcacggatcccgacgaggccgaggagtacatcaagatggtgtacaacatggtgattgggcccgtggcgttcgcctccgctacgtcggcattgtattgtcgagacggctacctccttggggtgtcgatcagccaccaggagtaccaaggagtgtatatcgattcagattgtctgacggaggtggctgtctattatctgcagaagatattagacagcgagaaccacaccatcgtcttccacaatctgaagttcgatatgcacttctacaagtaccacctggggctgacgttcgacaaggcccacaaggagcgccgtctccacgatacaatgctccagcactacgtgctggacgagcggaggggaacccacgggctcaagagcctcgccatgaagtacaccgatatgggcgattacgatttcgaacttgataagttcaaggacgactattgtaaggcccataagatcaagaaggaggacttcacctacgacttgatcccttttgacatcatgtggccgtacgcagctaaggacaccgatgcgacgatcaggctgcacaacttctttcttccgaagatcgagaagaacgagaagttgtgcagcctgtattacgacgtgttgatgcctggctgcgtgttcctgcagcgcgttgaggaccgcggcgtgcccatcagcatcgatcgactgaaggaggcgcagtatcagctcacacataatctgaacaaggcacgggagaagctttacacttacccggaggttaagcagctcgagcaggaccagaacgaggcgtttaaccccaatagtgtgaagcagctccgcgtgctcttgttcgattatgtggggctgacgccgactggtaagcttacggatacaggagcggatagcacggatgctgaggcgctgaacgagttagcgactcagcatccgattgctaagacgctcctggagatccgtaagcttaccaagttgatctccacttatgtggagaagatccttctgtcgatcgatgctgatgggtgcatccggacggggtttcatgagcacatgaccacgtccgggcgcctcagcagtagtgggaagctgaaccttcagcagctcccacgcgatgagtcgataatcaaggggtgcgtggtcgcaccccctggttatcgagtcatcgcgtgggatctcactactgctgaggtgtactacgccgcggtcctcagcggcgacaggaacatgcagcaggtgttcatcaacatgcgtaatgagccggataagtatccggacttccacagcaacatcgcgcatatggtgttcaagctgcagtgcgagccacgtgatgtcaagaagctgtttccagcgcttcggcaggcggcgaaggccattacgttcggtatactctatggcagtgggccagcgaaggtggcccactccgtcaacgaggcactcctcgagcaggccgccaagactggcgagccgttcgtggagtgcaccgttgcggatgccaaggagtatatcgaaacgtactttggccagttcccgcagctgaagcgctggatagataaatgccatgatcagatcaagaatcatggctttatctacagccattttggtcgcaaacggcggcttcataatatccatagcgaggatcgcggagtccagggcgaagagattcgctctggattcaacgcgatcatccagagcgctagttccgactccctcctcctcggcgctgtcgatgccgacaacgagatcatcagtcttggtctcgagcaggagatgaagattgtgatgctcgtgcacgatagcgtggtcgctatcgtgcgtgaggatctcattgaccagtacaatgagatcctcattcggaacatccagaaggatcgagggatctcgatccctggatgtccgatcggcatcgacagcgactccgaggcaggagggagtcgggactacagctgtggaaagatgaagaagcagcacccttccatagcgtgtatagacgacgacgagtatacacgctatgtgaagggtgtgcttcttgatgccgagttcgagtacaagaagttggccgctatggataaggagcaccccgaccactccaagtataaggatgacaagtttatcgcggtctgcaaagacctcgataatgtcaaacgtatacttggagctggcgggggctccggcaagcgcaccgctgacggctccggggggggctctccgaagaagaagcggaaggtgcccgctgcgaagcgggtaaagcttgattgactagcaccagcctcaagaacacccgaatggagtctctaagctacataataccaacttacactttacaaaatgttgtcccccaaaatgtagccattcgtatctgctcctaataaaaagaaagtttcttcacattctctcgagaaaaaaaaaaaatggaaaaaaaaaaaacggaaaaaaaaaaaaggtaaaaaaaaaaaatataaaaaaaaaaaacataaaaaaaaaaaacgaaaaaaaaaaaacgtaaaaaaaaaaaactcaaaaaaaaaaaagataaaaaaaaaaaacctaaaaaaaaaaaatgtaaaaaaaaaaaagggaaaaaaaaaaaacgcaaaaaaaaaaaacacaaaaaaaaaaaatgcaaaaaaaaaaaatcgaaaaaaaaaaaatctaaaaaaaaaaaacgaaaaaaaaaaaacccaaaaaaaaaaaagacaaaaaaaaaaaatagaaaaaaaaaaagttaaaaaaaaaaaactgaaaaaaaaaaaatttaaaaaaaaaaaatctag

SEQ ID NO: 2607 - DNA, 7522 bp, synthetic construct
  misc_feature 1..7522: note = Synthetic
  source 1..7522: mol_type = other DNA
aggaagctcagaataaacgctcaactttggccggatctgccaccatgaagcggcccgccgccaccaagaaggccggccaggccaagaagaagaaggacaagaagtactccatcggcctggacatcggcaccaactccgtgggctgggccgtgatcaccgacgagtacaaggtgccctccaagaagttcaaggtgctgggcaacaccgaccggcactccatcaagaagaacctgatcggcgccctgctgttcgactccggcgagaccgccgaggccacccggctgaagcggaccgcccggcggcggtacacccggcggaagaaccggatctgctacctgcaggagatcttctccaacgagatggccaaggtggacgactccttcttccaccggctggaggagtccttcctggtggaggaggacaagaagcacgagcggcaccccatcttcggcaacatcgtggacgaggtggcctaccacgagaagtaccccaccatctaccacctgcggaagaagctggtggactccaccgacaaggccgacctgcggctgatctacctggccctggcccacatgatcaagttccggggccacttcctgatcgagggcgacctgaaccccgacaactccgacgtggacaagctgttcatccagctggtgcagacctacaaccagctgttcgaggagaaccccatcaacgcctccggcgtggacgccaaggccatcctgtccgcccggctgtccaagtcccggcggctggagaacctgatcgcccagctgcccggcgagaagaagaacggcctgttcggcaacctgatcgccctgtccctgggcctgacccccaacttcaagtccaacttcgacctggccgaggacgccaagctgcagctgtccaaggacacctacgacgacgacctggacaacctgctggcccagatcggcgaccagtacgccgacctgttcctggccgccaagaacctgtccgacgccatcctgctgtccgacatcctgcgggtgaacaccgagatcaccaaggcccccctgtccgcctccatgatcaagcggtacgacgagcaccaccaggacctgaccctgctgaaggccctggtgcggcagcagctgcccgagaagtacaaggagatcttcttcgaccagtccaagaacggctacgccggctacatcgacggcggcgcctcccaggaggagttctacaagttcatcaagcccatcctggagaagatggacggcaccgaggagctgctggtgaagctgaaccgggaggacctgctgcggaagcagcggaccttcgacaacggctccatcccccaccagatccacctgggcgagctgcacgccatcctgcggcggcaggaggacttctaccccttcctgaaggacaaccgggagaagatcgagaagatcctgaccttccggatcccctactacgtgggccccctggcccggggcaactcccggttcgcctggatgacccggaagtccgaggagaccatcaccccctggaacttcgaggaggtggtggacaagggcgcctccgcccagtccttcatcgagcggatgaccaacttcgacaagaacctgcccaacgagaaggtgctgcccaagcactccctgctgtacgagtacttcaccgtgtacaacgagctgaccaaggtgaagtacgtgaccgagggcatgcggaagcccgccttcctgtccggcgagcagaagaaggccatcgtggacctgctgttcaagaccaaccggaaggtgaccgtgaagcagctgaaggaggactacttcaagaagatcgagtgcttcgactccgtggagatctccggcgtggaggaccggttcaacgcctccctgggcacctaccacgacctgctgaagatcatcaaggacaaggacttcctggacaacgaggagaacgaggacatcctggaggacatcgtgctgaccctgaccctgttcgaggaccgggagatgatcgaggagcggctgaagacctacgcccacctgttcgacgacaaggtgatgaagcagctgaagcggcggcggtacaccggctggggccggctgtcccggaagctgatcaacggcatccgggacaagcagtccggcaagaccatcctggacttcctgaagtccgacggcttcgccaaccggaacttcatgcagctgatccacgacgactccctgaccttcaaggaggacatccagaaggcccaggtgtccggccagggcgactccctgcacgagcacatcgccaacctggccggctcccccgccatcaagaagggcatcctgcagaccgtgaaggtggtggacgagctggtgaaggtgatgggccggcacaagcccgagaacatcgtgatcgagatggcccgggagaaccagaccacccagaagggccagaagaactcccgggagcggatgaagcggatcgaggagggcatcaaggagctgggctcccagatcctgaaggagcaccccgtggagaacacccagctgcagaacgagaagctgtacctgtactacctgcagaacggccgggacatgtacgtggaccaggagctggacatcaaccggctgtccgactacgacgtggactccatcgtgccccagtccttcctgaaggacgactccatcgacaacaaggtgctgacccggtccgacaagaaccggggcaagtccgacaacgtgccctccgaggaggtggtgaagaagatgaagaactactggcggcagctgctgaacgccaagctgatcacccagcggaagttcgacaacctgaccaaggccgagcggggcggcctgtccgagctggacaaggccggcttcatcaagcggcagctggtggagacccggcagatcaccaagcacgtggcccagatcctggactcccggatgaacaccaagtacgacgagaacgacaagctgatccgggaggtgaaggtgatcaccctgaagtccaagctggtgtccgacttccggaaggacttccagttctacaaggtgcgggagatcaacaactaccaccacgcccacgacgcctacctgaacgccgtggtgggcaccgccctgatcaagaagtaccccaagctggagtccgagttcgtgtacggcgactacaaggtgtacgacgtgcggaagatgatcgccaagtccgagcaggagatcggcaaggccaccgccaagtacttcttctactccaacatcatgaacttcttcaagaccgagatcaccctggccaacggcgagatccggaagcggcccctgatcgagaccaacggcgagaccggcgagatcgtgtgggacaagggccgggacttcgccaccgtgcggaaggtgctgtccatgccccaggtgaacatcgtgaagaagaccgaggtgcagaccggcggcttctccaaggagtccatcctgcccaagcggaactccgacaagctgatcgcccggaagaaggactgggaccccaagaagtacggcggcttcgactcccccaccgtggcctactccgtgctggtggtggccaaggtggagaagggcaagtccaagaagctgaagtccgtgaaggagctgctgggcatcaccatcatggagcggtcctccttcgagaagaaccccatcgacttcctggaggccaagggctacaaggaggtgaagaaggacctgatcatcaagctgcccaagtactccctgttcgagctggagaacggccggaagcggatgctggcctccgccggcgagctgcagaagggcaacgagctggccctgccctccaagtacgtgaacttcctgtacctggcctcccactacgagaagctgaagggctcccccgaggacaacgagcagaagcagctgttcgtggagcagcacaagcactacctggacgagatcatcgagcagatctccgagttctccaagcgggtgatcctggccgacgccaacctggacaaggtgctgtccgcctacaacaagcaccgggacaagcccatccgggagcaggccgagaacatcatccacctgttcaccctgaccaacctgggcgcccccgccgccttcaagtacttcgacaccaccatcgaccggaagcggtacacctccaccaaggaggtgctggacgccaccctgatccaccagtccatcaccggcctgtacgagacccggatcgacctgtcccagctgggcggcgacggcgcccccgagtccgccaccgagtccggcggcacctccaccgagtccgagggctccgccggccccaagaagaagcggaaggtgacctccaccgagtccgagggctccgccggctccgccggctccacctccggctcctcctccggcatgaagatcgccgtggtggacaaggccctgaacaacacccggtacgacaagcacttccagctgtacggcgaggaggtggacgtgttccacatgtgcaacgagaagctgtccggccggctgctgaagaagcacatcaccatcggcacccccgagaaccccttcgaccccaacgactacgacttcgtgatcctggtgggcgccgagcccttcctgtacttcgccggcaagaagggcatcggcgactacaccggcaagcgggtggagtacaacggctacgccaactggatcgcctccatctcccccgcccagctgcacttcaagcccgagatgaagcccgtgttcgacgccaccgtggagaacatccacgacatcatcaacggccgggagaagatcgccaaggccggcgactaccggcccatcaccgaccccgacgaggccgaggagtacatcaagatggtgtacaacatggtgatcggccccgtggccttcgcctccgccacctccgccctgtactgccgggacggctacctgctgggcgtgtccatctcccaccaggagtaccagggcgtgtacatcgactccgactgcctgaccgaggtggccgtgtactacctgcagaagatcctggactccgagaaccacaccatcgtgttccacaacctgaagttcgacatgcacttctacaagtaccacctgggcctgaccttcgacaaggcccacaaggagcggcggctgcacgacaccatgctgcagcactacgtgctggacgagcggcggggcacccacggcctgaagtccctggccatgaagtacaccgacatgggcgactacgacttcgagctggacaagttcaaggacgactactgcaaggcccacaagatcaagaaggaggacttcacctacgacctgatccccttcgacatcatgtggccctacgccgccaaggacaccgacgccaccatccggctgcacaacttcttcctgcccaagatcgagaagaacgagaagctgtgctccctgtactacgacgtgctgatgcccggctgcgtgttcctgcagcgggtggaggaccggggcgtgcccatctccatcgaccggctgaaggaggcccagtaccagctgacccacaacctgaacaaggcccgggagaagctgtacacctaccccgaggtgaagcagctggagcaggaccagaacgaggccttcaaccccaactccgtgaagcagctgcgggtgctgctgttcgactacgtgggcctgacccccaccggcaagctgaccgacaccggcgccgactccaccgacgccgaggccctgaacgagctggccacccagcaccccatcgccaagaccctgctggagatccggaagctgaccaagctgatctccacctacgtggagaagatcctgctgtccatcgacgccgacggctgcatccggaccggcttccacgagcacatgaccacctccggccggctgtcctcctccggcaagctgaacctgcagcagctgccccgggacgagtccatcatcaagggctgcgtggtggccccccccggctaccgggtgatcgcctgggacctgaccaccgccgaggtgtactacgccgccgtgctgtccggcgaccggaacatgcagcaggtgttcatcaacatgcggaacgagcccgacaagtaccccgacttccactccaacatcgcccacatggtgttcaagctgcagtgcgagccccgggacgtgaagaagctgttccccgccctgcggcaggccgccaaggccatcaccttcggcatcctgtacggctccggccccgccaaggtggcccactccgtgaacgaggccctgctggagcaggccgccaagaccggcgagcccttcgtggagtgcaccgtggccgacgccaaggagtacatcgagacctacttcggccagttcccccagctgaagcggtggatcgacaagtgccacgaccagatcaagaaccacggcttcatctactcccacttcggccggaagcggcggctgcacaacatccactccgaggaccggggcgtgcagggcgaggagatccggtccggcttcaacgccatcatccagtccgcctcctccgactccctgctgctgggcgccgtggacgccgacaacgagatcatctccctgggcctggagcaggagatgaagatcgtgatgctggtgcacgactccgtggtggccatcgtgcgggaggacctgatcgaccagtacaacgagatcctgatccggaacatccagaaggaccggggcatctccatccccggctgccccatcggcatcgactccgactccgaggccggcggctcccgggactactcctgcggcaagatgaagaagcagcacccctccatcgcctgcatcgacgacgacgagtacacccggtacgtgaagggcgtgctgctggacgccgagttcgagtacaagaagctggccgccatggacaaggagcaccccgaccactccaagtacaaggacgacaagttcatcgccgtgtgcaaggacctggacaacgtgaagcggatcctgggcgccggcggcggctccggcaagcggaccgccgacggctccggcggcggctcccccaagaagaagcggaaggtgcctgccgctaagagagtgaagctggactagctagcaccagcctcaagaacacccgaatggagtctctaagctacataataccaacttacactttacaaaatgttgtcccccaaaatgtagccattcgtatctgctcctaataaaaagaaagtttcttcacattctctcgagaaaaaaaaaaaatggaaaaaaaaaaaacggaaaaaaaaaaaaggtaaaaaaaaaaaatataaaaaaaaaaaacataaaaaaaaaaaacgaaaaaaaaaaaacgtaaaaaaaaaaaactcaaaaaaaaaaaagataaaaaaaaaaaacctaaaaaaaaaaaatgtaaaaaaaaaaaagggaaaaaaaaaaaacgcaaaaaaaaaaaacacaaaaaaaaaaaatgcaaaaaaaaaaaatcgaaaaaaaaaaaatctaaaaaaaaaaaacgaaaaaaaaaaaacccaaaaaaaaaaaagacaaaaaaaaaaaatagaaaaaaaaaaagttaaaaaaaaaaaactgaaaaaaaaaaaatttaaaaaaaaaaaatctag

SEQ ID NO: 2608 - DNA, 7612 bp, synthetic construct
  misc_feature 1..7612: note = Synthetic
  source 1..7612: mol_type = other DNA
aggactcactatttgttttcgcgcccagttgcaaaaagtgtcgaaaaaaaaaaaaccaaaaaaaaaaaacaaaaaaaaaaaataattgactaaaagctcagaataaacgctcaactttggccggatctgccaccatgaagcggcccgccgccaccaagaaggccggccaggccaagaagaagaaggacaagaagtactccatcggcctggacatcggcaccaactccgtgggctgggccgtgatcaccgacgagtacaaggtgccctccaagaagttcaaggtgctgggcaacaccgaccggcactccatcaagaagaacctgatcggcgccctgctgttcgactccggcgagaccgccgaggccacccggctgaagcggaccgcccggcggcggtacacccggcggaagaaccggatctgctacctgcaggagatcttctccaacgagatggccaaggtggacgactccttcttccaccggctggaggagtccttcctggtggaggaggacaagaagcacgagcggcaccccatcttcggcaacatcgtggacgaggtggcctaccacgagaagtaccccaccatctaccacctgcggaagaagctggtggactccaccgacaaggccgacctgcggctgatctacctggccctggcccacatgatcaagttccggggccacttcctgatcgagggcgacctgaaccccgacaactccgacgtggacaagctgttcatccagctggtgcagacctacaaccagctgttcgaggagaaccccatcaacgcctccggcgtggacgccaaggccatcctgtccgcccggctgtccaagtcccggcggctggagaacctgatcgcccagctgcccggcgagaagaagaacggcctgttcggcaacctgatcgccctgtccctgggcctgacccccaacttcaagtccaacttcgacctggccgaggacgccaagctgcagctgtccaaggacacctacgacgacgacctggacaacctgctggcccagatcggcgaccagtacgccgacctgttcctggccgccaagaacctgtccgacgccatcctgctgtccgacatcctgcgggtgaacaccgagatcaccaaggcccccctgtccgcctccatgatcaagcggtacgacgagcaccaccaggacctgaccctgctgaaggccctggtgcggcagcagctgcccgagaagtacaaggagatcttcttcgaccagtccaagaacggctacgccggctacatcgacggcggcgcctcccaggaggagttctacaagttcatcaagcccatcctggagaagatggacggcaccgaggagctgctggtgaagctgaaccgggaggacctgctgcggaagcagcggaccttcgacaacggctccatcccccaccagatccacctgggcgagctgcacgccatcctgcggcggcaggaggacttctaccccttcctgaaggacaaccgggagaagatcgagaagatcctgaccttccggatcccctactacgtgggccccctggcccggggcaactcccggttcgcctggatgacccggaagtccgaggagaccatcaccccctggaacttcgaggaggtggtggacaagggcgcctccgcccagtccttcatcgagcggatgaccaacttcgacaagaacctgcccaacgagaaggtgctgcccaagcactccctgctgtacgagtacttcaccgtgtacaacgagctgaccaaggtgaagtacgtgaccgagggcatgcggaagcccgccttcctgtccggcgagcagaagaaggccatcgtggacctgctgttcaagaccaaccggaaggtgaccgtgaagcagctgaaggaggactacttcaagaagatcgagtgcttcgactccgtggagatctccggcgtggaggaccggttcaacgcctccctgggcacctaccacgacctgctgaagatcatcaaggacaaggacttcctggacaacgaggagaacgaggacatcctggaggacatcgtgctgaccctgaccctgttcgaggaccgggagatgatcgaggagcggctgaagacctacgcccacctgttcgacgacaaggtgatgaagcagctgaagcggcggcggtacaccggctggggccggctgtcccggaagctgatcaacggcatccgggacaagcagtccggcaagaccatcctggacttcctgaagtccgacggcttcgccaaccggaacttcatgcagctgatccacgacgactccctgaccttcaaggaggacatccagaaggcccaggtgtccggccagggcgactccctgcacgagcacatcgccaacctggccggctcccccgccatcaagaagggcatcctgcagaccgtgaaggtggtggacgagctggtgaaggtgatgggccggcacaagcccgagaacatcgtgatcgagatggcccgggagaaccagaccacccagaagggccagaagaactcccgggagcggatgaagcggatcgaggagggcatcaaggagctgggctcccagatcctgaaggagcaccccgtggagaacacccagctgcagaacgagaagctgtacctgtactacctgcagaacggccgggacatgtacgtggaccaggagctggacatcaaccggctgtccgactacgacgtggactccatcgtgccccagtccttcctgaaggacgactccatcgacaacaaggtgctgacccggtccgacaagaaccggggcaagtccgacaacgtgccctccgaggaggtggtgaagaagatgaagaactactggcggcagctgctgaacgccaagctgatcacccagcggaagttcgacaacctgaccaaggccgagcggggcggcctgtccgagctggacaaggccggcttcatcaagcggcagctggtggagacccggcagatcaccaagcacgtggcccagatcctggactcccggatgaacaccaagtacgacgagaacgacaagctgatccgggaggtgaaggtgatcaccctgaagtccaagctggtgtccgacttccggaaggacttccagttctacaaggtgcgggagatcaacaactaccaccacgcccacgacgcctacctgaacgccgtggtgggcaccgccctgatcaagaagtaccccaagctggagtccgagttcgtgtacggcgactacaaggtgtacgacgtgcggaagatgatcgccaagtccgagcaggagatcggcaaggccaccgccaagtacttcttctactccaacatcatgaacttcttcaagaccgagatcaccctggccaacggcgagatccggaagcggcccctgatcgagaccaacggcgagaccggcgagatcgtgtgggacaagggccgggacttcgccaccgtgcggaaggtgctgtccatgccccaggtgaacatcgtgaagaagaccgaggtgcagaccggcggcttctccaaggagtccatcctgcccaagcggaactccgacaagctgatcgcccggaagaaggactgggaccccaagaagtacggcggcttcgactcccccaccgtggcctactccgtgctggtggtggccaaggtggagaagggcaagtccaagaagctgaagtccgtgaaggagctgctgggcatcaccatcatggagcggtcctccttcgagaagaaccccatcgacttcctggaggccaagggctacaaggaggtgaagaaggacctgatcatcaagctgcccaagtactccctgttcgagctggagaacggccggaagcggatgctggcctccgccggcgagctgcagaagggcaacgagctggccctgccctccaagtacgtgaacttcctgtacctggcctcccactacgagaagctgaagggctcccccgaggacaacgagcagaagcagctgttcgtggagcagcacaagcactacctggacgagatcatcgagcagatctccgagttctccaagcgggtgatcctggccgacgccaacctggacaaggtgctgtccgcctacaacaagcaccgggacaagcccatccgggagcaggccgagaacatcatccacctgttcaccctgaccaacctgggcgcccccgccgccttcaagtacttcgacaccaccatcgaccggaagcggtacacctccaccaaggaggtgctggacgccaccctgatccaccagtccatcaccggcctgtacgagacccggatcgacctgtcccagctgggcggcgacggcgcccccgagtccgccaccgagtccggcggcacctccaccgagtccgagggctccgccggccccaagaagaagcggaaggtgacctccaccgagtccgagggctccgccggctccgccggctccacctccggctcctcctccggcatgaagatcgccgtggtggacaaggccctgaacaacacccggtacgacaagcacttccagctgtacggcgaggaggtggacgtgttccacatgtgcaacgagaagctgtccggccggctgctgaagaagcacatcaccatcggcacccccgagaaccccttcgaccccaacgactacgacttcgtgatcctggtgggcgccgagcccttcctgtacttcgccggcaagaagggcatcggcgactacaccggcaagcgggtggagtacaacggctacgccaactggatcgcctccatctcccccgcccagctgcacttcaagcccgagatgaagcccgtgttcgacgccaccgtggagaacatccacgacatcatcaacggccgggagaagatcgccaaggccggcgactaccggcccatcaccgaccccgacgaggccgaggagtacatcaagatggtgtacaacatggtgatcggccccgtggccttcgcctccgccacctccgccctgtactgccgggacggctacctgctgggcgtgtccatctcccaccaggagtaccagggcgtgtacatcgactccgactgcctgaccgaggtggccgtgtactacctgcagaagatcctggactccgagaaccacaccatcgtgttccacaacctgaagttcgacatgcacttctacaagtaccacctgggcctgaccttcgacaaggcccacaaggagcggcggctgcacgacaccatgctgcagcactacgtgctggacgagcggcggggcacccacggcctgaagtccctggccatgaagtacaccgacatgggcgactacgacttcgagctggacaagttcaaggacgactactgcaaggcccacaagatcaagaaggaggacttcacctacgacctgatccccttcgacatcatgtggccctacgccgccaaggacaccgacgccaccatccggctgcacaacttcttcctgcccaagatcgagaagaacgagaagctgtgctccctgtactacgacgtgctgatgcccggctgcgtgttcctgcagcgggtggaggaccggggcgtgcccatctccatcgaccggctgaaggaggcccagtaccagctgacccacaacctgaacaaggcccgggagaagctgtacacctaccccgaggtgaagcagctggagcaggaccagaacgaggccttcaaccccaactccgtgaagcagctgcgggtgctgctgttcgactacgtgggcctgacccccaccggcaagctgaccgacaccggcgccgactccaccgacgccgaggccctgaacgagctggccacccagcaccccatcgccaagaccctgctggagatccggaagctgaccaagctgatctccacctacgtggagaagatcctgctgtccatcgacgccgacggctgcatccggaccggcttccacgagcacatgaccacctccggccggctgtcctcctccggcaagctgaacctgcagcagctgccccgggacgagtccatcatcaagggctgcgtggtggccccccccggctaccgggtgatcgcctgggacctgaccaccgccgaggtgtactacgccgccgtgctgtccggcgaccggaacatgcagcaggtgttcatcaacatgcggaacgagcccgacaagtaccccgacttccactccaacatcgcccacatggtgttcaagctgcagtgcgagccccgggacgtgaagaagctgttccccgccctgcggcaggccgccaaggccatcaccttcggcatcctgtacggctccggccccgccaaggtggcccactccgtgaacgaggccctgctggagcaggccgccaagaccggcgagcccttcgtggagtgcaccgtggccgacgccaaggagtacatcgagacctacttcggccagttcccccagctgaagcggtggatcgacaagtgccacgaccagatcaagaaccacggcttcatctactcccacttcggccggaagcggcggctgcacaacatccactccgaggaccggggcgtgcagggcgaggagatccggtccggcttcaacgccatcatccagtccgcctcctccgactccctgctgctgggcgccgtggacgccgacaacgagatcatctccctgggcctggagcaggagatgaagatcgtgatgctggtgcacgactccgtggtggccatcgtgcgggaggacctgatcgaccagtacaacgagatcctgatccggaacatccagaaggaccggggcatctccatccccggctgccccatcggcatcgactccgactccgaggccggcggctcccgggactactcctgcggcaagatgaagaagcagcacccctccatcgcctgcatcgacgacgacgagtacacccggtacgtgaagggcgtgctgctggacgccgagttcgagtacaagaagctggccgccatggacaaggagcaccccgaccactccaagtacaaggacgacaagttcatcgccgtgtgcaaggacctggacaacgtgaagcggatcctgggcgccggcggcggctccggcaagcggaccgccgacggctccggcggcggctcccccaagaagaagcggaaggtgcctgccgctaagagagtgaagctggactagctagcaccagcctcaagaacacccgaatggagtctctaagctacataataccaacttacactttacaaaatgttgtcccccaaaatgtagccattcgtatctgctcctaataaaaagaaagtttcttcacattctctcgagaaaaaaaaaaaatggaaaaaaaaaaaacggaaaaaaaaaaaaggtaaaaaaaaaaaatataaaaaaaaaaaacataaaaaaaaaaaacgaaaaaaaaaaaacgtaaaaaaaaaaaactcaaaaaaaaaaaagataaaaaaaaaaaacctaaaaaaaaaaaatgtaaaaaaaaaaaagggaaaaaaaaaaaacgcaaaaaaaaaaaacacaaaaaaaaaaaatgcaaaaaaaaaaaatcgaaaaaaaaaaaatctaaaaaaaaaaaacgaaaaaaaaaaaacccaaaaaaaaaaaagacaaaaaaaaaaaatagaaaaaaaaaaagttaaaaaaaaaaaactgaaaaaaaaaaaatttaaaaaaaaaaaatctag

SEQ ID NO: 2609 - DNA, 7522 bp, synthetic construct
  misc_feature 1..7522: note = Synthetic
  source 1..7522: mol_type = other DNA
aggaagctcagaataaacgctcaactttggccggatctgccaccatgaagcggccggctgcgaccaagaaggctggtcaggctaagaagaagaaggacaagaagtactccatcggcctcgacatcgggacgaactccgtgggttgggcggtgatcaccgatgagtacaaggtcccgtccaagaaattcaaggtgctgggtaacaccgatcgacatagtatcaagaagaacctgatcggggccctcttgttcgacagcggcgagactgctgaggcgacgcgcttgaagaggacggcccggcgtcgatacacccgacgcaagaatcggatttgctatctccaggagatcttctccaacgagatggcaaaggtggacgactcgttcttccaccgcctcgaggagagctttctcgtcgaggaggacaagaagcacgagcgccaccccatattcgggaatatcgtggatgaggtcgcctatcacgagaagtaccccacgatttatcatttgcgcaagaagctggtagattcaaccgacaaggcggacttgcggttgatctacctagctcttgcgcatatgataaagtttcgggggcacttcttgattgaaggcgacctcaatcccgataactcggatgtggacaagctcttcatacagctggtgcagacctacaaccagctgtttgaagagaatccgattaatgcgtcgggtgtcgacgccaaggccatcctcagcgcgcgcctcagcaagtctcgccgccttgagaatctgattgcccagctcccgggcgagaagaagaacgggttgttcggtaaccttattgcgctgtcgcttggcctcactccgaacttcaagtcgaacttcgacttggcggaggacgccaagctgcagctcagtaaggatacctacgacgacgacctggacaatcttctcgcccagatcggcgaccagtacgccgatctcttcctggcggcgaagaatctgagcgatgcaattctcctgagtgacattctgagggtgaatactgaaattacgaaggctccgctgtctgccagcatgatcaagcggtacgatgagcatcaccaggacctgacgctcctcaaggctctcgtccgtcagcagctcccggagaagtacaaggagatcttcttcgaccagtcgaagaacggatacgccgggtacatcgacgggggcgcttcccaggaggagttttataagtttataaagcccatcctggagaagatggacgggaccgaggagctcctggtgaagctcaaccgcgaggatctgctgcgcaagcagcggaccttcgataatggcagtattccccatcagattcacttaggagagttgcacgcgattcttcgccgccaggaagacttctaccccttcctcaaagataacagggagaagatcgagaagatcctcaccttccgcatcccgtattacgtgggtcccctggcgcgggggaactcacgttttgcgtggatgacgcggaagagtgaggagacgatcactccctggaactttgaggaagtggtagacaagggtgcttcggcacagtccttcatcgagcggatgacaaattttgacaagaatttgccgaacgagaaggtcttgccgaagcactcgctgctttacgagtactttacggtttacaacgagttgacgaaggtcaagtacgtcactgagggaatgcggaagcccgcattcctcagtggcgaacagaagaaggccatcgtcgacttgttgttcaagacgaaccgtaaagtaaccgtgaagcagctgaaggaggactacttcaagaagatcgagtgcttcgactccgttgagatcagcggagtcgaagaccgatttaatgcctccctcggtacgtatcatgatctcctcaagattatcaaggataaggacttccttgataatgaggagaatgaggatattctcgaggacattgtgctgaccctcaccctgttcgaagaccgtgagatgattgaggaacggttgaagacctacgctcatctgtttgatgacaaggtcatgaagcagttgaagcgtaggcgttataccggctggggtcgtctttcccgaaagcttatcaacgggatccgtgataagcagtcgggaaagacgatcctagacttcctcaagtctgacggttttgcgaacaggaacttcatgcagctcatccacgacgactccttgaccttcaaggaggatatccagaaggcgcaggtgagcggccagggcgatagcttgcacgagcatatcgcgaacctggccggctcacctgcgatcaagaagggtatcctccagacggtcaaggtcgtggatgagctcgtgaaggtgatgggtcggcacaagcccgagaatatcgtcatcgagatggctcgcgagaatcagacgacccagaagggtcagaagaattctcgcgagcgcatgaagcgtatcgaggagggcattaaggagctgggcagtcagattctcaaggagcaccctgtcgagaacacgcagcttcagaacgagaagctgtatctttactacctccagaacggacgggacatgtacgtagatcaggagctggacatcaaccggctctctgactacgatgtcgattctatcgtccctcagagctttctgaaggacgatagcatcgacaacaaggtcctgactcgctccgataagaatcggggcaagtcggacaatgtcccgtccgaggaggtagtgaagaagatgaagaactattggcgtcagctgttgaacgcgaagctgatcactcagagaaagttcgataatctcaccaaggccgagagggggggtctgagcgagcttgataaggcgggtttcatcaagcggcagcttgttgagacccgccagatcacgaagcacgtcgctcagatcctcgactctcggatgaacaccaagtacgacgagaatgacaagcttattcgggaggtcaaggtcattacccttaagtcgaagctcgtcagcgactttcgcaaggattttcagttttataaagttcgtgagataaacaattatcaccatgcccacgacgcgtacctgaacgccgtcgtgggcacggcgctgataaagaagtacccgaagctggagtccgagttcgtttatggcgattataaggtgtacgacgtgcgcaagatgatcgccaagagcgagcaggagatcggaaaggctacggcgaagtacttcttttacagcaacatcatgaacttttttaagactgagatcacccttgcgaatggcgagatccgcaagcgcccgttgatcgagacgaacggggagactggggagattgtgtgggataagggtcgggatttcgctacggtgagaaaggttctttcgatgccccaggtcaacatcgtcaagaagacggaggttcagaccgggggcttctcgaaagaatctatcttaccgaagcgaaattccgacaagcttatcgcacgcaagaaggactgggaccccaagaagtacggggggttcgacagtcctacggtggcctactccgtgttggtggtcgccaaggttgagaagggcaagagcaagaagctcaagtccgtcaaggagctcttggggatcaccatcatggagaggtcatcgtttgagaagaatcctattgacttccttgaagccaagggctacaaggaagtcaagaaggatttgatcatcaagctccccaagtactccctgttcgagctcgagaacgggcgcaagcggatgctcgccagcgctggcgagcttcagaagggtaatgagcttgccctcccgagtaagtatgtcaatttcttgtacttggcgtcgcactacgagaagctgaagggctcgccggaggacaacgagcagaagcagcttttcgtagagcagcacaagcactaccttgatgagattatcgagcagatctctgagttcagcaagcgcgttatactagctgacgccaatctcgacaaggtgctctcggcttataacaagcaccgggataagccgatacgtgagcaggcggagaacatcatccacctgttcacgttgacgaacttgggggccccggcagcgttcaagtattttgatactacgatcgatcggaagcgttacaccagcaccaaggaggtcttggacgcgaccttgattcatcagtcgatcacgggtctctacgagacccggatcgacctgtcgcagctcgggggcgacggcgcccccgagtctgcgacagagtcgggcgggacttccaccgagagtgaaggatcggccggccccaagaagaagcgcaaagtcacgtcgacggagtcggaggggtctgcggggtccgcggggagcacgtccggctcctcctcgggcatgaagatcgctgttgtcgataaggcgttgaacaatacgcgttacgacaagcattttcagctgtacggggaggaggtggacgtgttccatatgtgcaatgagaagctgagcggtcggcttctcaagaagcacataaccatcgggaccccggagaaccccttcgacccgaacgactatgactttgtgattcttgttggggccgagccgttcctttactttgcggggaagaaggggatcggggactataccggtaagcgtgtcgagtacaatggatacgctaactggatagcctcgatctcccccgcccagcttcatttcaagcctgagatgaagccggtcttcgacgcgaccgttgagaatatccacgatattatcaacggtcgcgagaagatcgcgaaggccggtgattaccgcccaatcacggatcccgacgaggccgaggagtacatcaagatggtgtacaacatggtgattgggcccgtggcgttcgcctccgctacgtcggcattgtattgtcgagacggctacctccttggggtgtcgatcagccaccaggagtaccaaggagtgtatatcgattcagattgtctgacggaggtggctgtctattatctgcagaagatattagacagcgagaaccacaccatcgtcttccacaatctgaagttcgatatgcacttctacaagtaccacctggggctgacgttcgacaaggcccacaaggagcgccgtctccacgatacaatgctccagcactacgtgctggacgagcggaggggaacccacgggctcaagagcctcgccatgaagtacaccgatatgggcgattacgatttcgaacttgataagttcaaggacgactattgtaaggcccataagatcaagaaggaggacttcacctacgacttgatcccttttgacatcatgtggccgtacgcagctaaggacaccgatgcgacgatcaggctgcacaacttctttcttccgaagatcgagaagaacgagaagttgtgcagcctgtattacgacgtgttgatgcctggctgcgtgttcctgcagcgcgttgaggaccgcggcgtgcccatcagcatcgatcgactgaaggaggcgcagtatcagctcacacataatctgaacaaggcacgggagaagctttacacttacccggaggttaagcagctcgagcaggaccagaacgaggcgtttaaccccaatagtgtgaagcagctccgcgtgctcttgttcgattatgtggggctgacgccgactggtaagcttacggatacaggagcggatagcacggatgctgaggcgctgaacgagttagcgactcagcatccgattgctaagacgctcctggagatccgtaagcttaccaagttgatctccacttatgtggagaagatccttctgtcgatcgatgctgatgggtgcatccggacggggtttcatgagcacatgaccacgtccgggcgcctcagcagtagtgggaagctgaaccttcagcagctcccacgcgatgagtcgataatcaaggggtgcgtggtcgcaccccctggttatcgagtcatcgcgtgggatctcactactgctgaggtgtactacgccgcggtcctcagcggcgacaggaacatgcagcaggtgttcatcaacatgcgtaatgagccggataagtatccggacttccacagcaacatcgcgcatatggtgttcaagctgcagtgcgagccacgtgatgtcaagaagctgtttccagcgcttcggcaggcggcgaaggccattacgttcggtatactctatggcagtgggccagcgaaggtggcccactccgtcaacgaggcactcctcgagcaggccgccaagactggcgagccgttcgtggagtgcaccgttgcggatgccaaggagtatatcgaaacgtactttggccagttcccgcagctgaagcgctggatagataaatgccatgatcagatcaagaatcatggctttatctacagccattttggtcgcaaacggcggcttcataatatccatagcgaggatcgcggagtccagggcgaagagattcgctctggattcaacgcgatcatccagagcgctagttccgactccctcctcctcggcgctgtcgatgccgacaacgagatcatcagtcttggtctcgagcaggagatgaagattgtgatgctcgtgcacgatagcgtggtcgctatcgtgcgtgaggatctcattgaccagtacaatgagatcctcattcggaacatccagaaggatcgagggatctcgatccctggatgtccgatcggcatcgacagcgactccgaggcaggagggagtcgggactacagctgtggaaagatgaagaagcagcacccttccatagcgtgtatagacgacgacgagtatacacgctatgtgaagggtgtgcttcttgatgccgagttcgagtacaagaagttggccgctatggataaggagcaccccgaccactccaagtataaggatgacaagtttatcgcggtctgcaaagacctcgataatgtcaaacgtatacttggagctggcgggggctccggcaagcgcaccgctgacggctccggggggggctctccgaagaagaagcggaaggtgcccgctgcgaagcgggtaaagcttgattgactagcaccagcctcaagaacacccgaatggagtctctaagctacataataccaacttacactttacaaaatgttgtcccccaaaatgtagccattcgtatctgctcctaataaaaagaaagtttcttcacattctctcgagaaaaaaaaaaaatggaaaaaaaaaaaacggaaaaaaaaaaaaggtaaaaaaaaaaaatataaaaaaaaaaaacataaaaaaaaaaaacgaaaaaaaaaaaacgtaaaaaaaaaaaactcaaaaaaaaaaaagataaaaaaaaaaaacctaaaaaaaaaaaatgtaaaaaaaaaaaagggaaaaaaaaaaaacgcaaaaaaaaaaaacacaaaaaaaaaaaatgcaaaaaaaaaaaatcgaaaaaaaaaaaatctaaaaaaaaaaaacgaaaaaaaaaaaacccaaaaaaaaaaaagacaaaaaaaaaaaatagaaaaaaaaaaagttaaaaaaaaaaaactgaaaaaaaaaaaatttaaaaaaaaaaaatctag

SEQ ID NO: 2610 - DNA, 7612 bp, synthetic construct
  misc_feature 1..7612: note = Synthetic
  source 1..7612: mol_type = other DNA
aggactcactatttgttttcgcgcccagttgcaaaaagtgtcgaaaaaaaaaaaaccaaaaaaaaaaaacaaaaaaaaaaaataattgactaaaagctcagaataaacgctcaactttggccggatctgccaccatgaagcggccggctgcgaccaagaaggctggtcaggctaagaagaagaaggacaagaagtactccatcggcctcgacatcgggacgaactccgtgggttgggcggtgatcaccgatgagtacaaggtcccgtccaagaaattcaaggtgctgggtaacaccgatcgacatagtatcaagaagaacctgatcggggccctcttgttcgacagcggcgagactgctgaggcgacgcgcttgaagaggacggcccggcgtcgatacacccgacgcaagaatcggatttgctatctccaggagatcttctccaacgagatggcaaaggtggacgactcgttcttccaccgcctcgaggagagctttctcgtcgaggaggacaagaagcacgagcgccaccccatattcgggaatatcgtggatgaggtcgcctatcacgagaagtaccccacgatttatcatttgcgcaagaagctggtagattcaaccgacaaggcggacttgcggttgatctacctagctcttgcgcatatgataaagtttcgggggcacttcttgattgaaggcgacctcaatcccgataactcggatgtggacaagctcttcatacagctggtgcagacctacaaccagctgtttgaagagaatccgattaatgcgtcgggtgtcgacgccaaggccatcctcagcgcgcgcctcagcaagtctcgccgccttgagaatctgattgcccagctcccgggcgagaagaagaacgggttgttcggtaaccttattgcgctgtcgcttggcctcactccgaacttcaagtcgaacttcgacttggcggaggacgccaagctgcagctcagtaaggatacctacgacgacgacctggacaatcttctcgcccagatcggcgaccagtacgccgatctcttcctggcggcgaagaatctgagcgatgcaattctcctgagtgacattctgagggtgaatactgaaattacgaaggctccgctgtctgccagcatgatcaagcggtacgatgagcatcaccaggacctgacgctcctcaaggctctcgtccgtcagcagctcccggagaagtacaaggagatcttcttcgaccagtcgaagaacggatacgccgggtacatcgacgggggcgcttcccaggaggagttttataagtttataaagcccatcctggagaagatggacgggaccgaggagctcctggtgaagctcaaccgcgaggatctgctgcgcaagcagcggaccttcgataatggcagtattccccatcagattcacttaggagagttgcacgcgattcttcgccgccaggaagacttctaccccttcctcaaagataacagggagaagatcgagaagatcctcaccttccgcatcccgtattacgtgggtcccctggcgcgggggaactcacgttttgcgtggatgacgcggaagagtgaggagacgatcactccctggaactttgaggaagtggtagacaagggtgcttcggcacagtccttcatcgagcggatgacaaattttgacaagaatttgccgaacgagaaggtcttgccgaagcactcgctgctttacgagtactttacggtttacaacgagttgacgaaggtcaagtacgtcactgagggaatgcggaagcccgcattcctcagtggcgaacagaagaaggccatcgtcgacttgttgttcaagacgaaccgtaaagtaaccgtgaagcagctgaaggaggactacttcaagaagatcgagtgcttcgactccgttgagatcagcggagtcgaagaccgatttaatgcctccctcggtacgtatcatgatctcctcaagattatcaaggataaggacttccttgataatgaggagaatgaggatattctcgaggacattgtgctgaccctcaccctgttcgaagaccgtgagatgattgaggaacggttgaagacctacgctcatctgtttgatgacaaggtcatgaagcagttgaagcgtaggcgttataccggctggggtcgtctttcccgaaagcttatcaacgggatccgtgataagcagtcgggaaagacgatcctagacttcctcaagtctgacggttttgcgaacaggaacttcatgcagctcatccacgacgactccttgaccttcaaggaggatatccagaaggcgcaggtgagcggccagggcgatagcttgcacgagcatatcgcgaacctggccggctcacctgcgatcaagaagggtatcctccagacggtcaaggtcgtggatgagctcgtgaaggtgatgggtcggcacaagcccgagaatatcgtcatcgagatggctcgcgagaatcagacgacccagaagggtcagaagaattctcgcgagcgcatgaagcgtatcgaggagggcattaaggagctgggcagtcagattctcaaggagcaccctgtcgagaacacgcagcttcagaacgagaagctgtatctttactacctccagaacggacgggacatgtacgtagatcaggagctggacatcaaccggctctctgactacgatgtcgattctatcgtccctcagagctttctgaaggacgatagcatcgacaacaaggtcctgactcgctccgataagaatcggggcaagtcggacaatgtcccgtccgaggaggtagtgaagaagatgaagaactattggcgtcagctgttgaacgcgaagctgatcactcagagaaagttcgataatctcaccaaggccgagagggggggtctgagcgagcttgataaggcgggtttcatcaagcggcagcttgttgagacccgccagatcacgaagcacgtcgctcagatcctcgactctcggatgaacaccaagtacgacgagaatgacaagcttattcgggaggtcaaggtcattacccttaagtcgaagctcgtcagcgactttcgcaaggattttcagttttataaagttcgtgagataaacaattatcaccatgcccacgacgcgtacctgaacgccgtcgtgggcacggcgctgataaagaagtacccgaagctggagtccgagttcgtttatggcgattataaggtgtacgacgtgcgcaagatgatcgccaagagcgagcaggagatcggaaaggctacggcgaagtacttcttttacagcaacatcatgaacttttttaagactgagatcacccttgcgaatggcgagatccgcaagcgcccgttgatcgagacgaacggggagactggggagattgtgtgggataagggtcgggatttcgctacggtgagaaaggttctttcgatgccccaggtcaacatcgtcaagaagacggaggttcagaccgggggcttctcgaaagaatctatcttaccgaagcgaaattccgacaagcttatcgcacgcaagaaggactgggaccccaagaagtacggggggttcgacagtcctacggtggcctactccgtgttggtggtcgccaaggttgagaagggcaagagcaagaagctcaagtccgtcaaggagctcttggggatcaccatcatggagaggtcatcgtttgagaagaatcctattgacttccttgaagccaagggctacaaggaagtcaagaaggatttgatcatcaagctccccaagtactccctgttcgagctcgagaacgggcgcaagcggatgctcgccagcgctggcgagcttcagaagggtaatgagcttgccctcccgagtaagtatgtcaatttcttgtacttggcgtcgcactacgagaagctgaagggctcgccggaggacaacgagcagaagcagcttttcgtagagcagcacaagcactaccttgatgagattatcgagcagatctctgagttcagcaagcgcgttatactagctgacgccaatctcgacaaggtgctctcggcttataacaagcaccgggataagccgatacgtgagcaggcggagaacatcatccacctgttcacgttgacgaacttgggggccccggcagcgttcaagtattttgatactacgatcgatcggaagcgttacaccagcaccaaggaggtcttggacgcgaccttgattcatcagtcgatcacgggtctctacgagacccggatcgacctgtcgcagctcgggggcgacggcgcccccgagtctgcgacagagtcgggcgggacttccaccgagagtgaaggatcggccggccccaagaagaagcgcaaagtcacgtcgacggagtcggaggggtctgcggggtccgcggggagcacgtccggctcctcctcgggcatgaagatcgctgttgtcgataaggcgttgaacaatacgcgttacgacaagcattttcagctgtacggggaggaggtggacgtgttccatatgtgcaatgagaagctgagcggtcggcttctcaagaagcacataaccatcgggaccccggagaaccccttcgacccgaacgactatgactttgtgattcttgttggggccgagccgttcctttactttgcggggaagaaggggatcggggactataccggtaagcgtgtcgagtacaatggatacgctaactggatagcctcgatctcccccgcccagcttcatttcaagcctgagatgaagccggtcttcgacgcgaccgttgagaatatccacgatattatcaacggtcgcgagaagatcgcgaaggccggtgattaccgcccaatcacggatcccgacgaggccgaggagtacatcaagatggtgtacaacatggtgattgggcccgtggcgttcgcctccgctacgtcggcattgtattgtcgagacggctacctccttggggtgtcgatcagccaccaggagtaccaaggagtgtatatcgattcagattgtctgacggaggtggctgtctattatctgcagaagatattagacagcgagaaccacaccatcgtcttccacaatctgaagttcgatatgcacttctacaagtaccacctggggctgacgttcgacaaggcccacaaggagcgccgtctccacgatacaatgctccagcactacgtgctggacgagcggaggggaacccacgggctcaagagcctcgccatgaagtacaccgatatgggcgattacgatttcgaacttgataagttcaaggacgactattgtaaggcccataagatcaagaaggaggacttcacctacgacttgatcccttttgacatcatgtggccgtacgcagctaaggacaccgatgcgacgatcaggctgcacaacttctttcttccgaagatcgagaagaacgagaagttgtgcagcctgtattacgacgtgttgatgcctggctgcgtgttcctgcagcgcgttgaggaccgcggcgtgcccatcagcatcgatcgactgaaggaggcgcagtatcagctcacacataatctgaacaaggcacgggagaagctttacacttacccggaggttaagcagctcgagcaggaccagaacgaggcgtttaaccccaatagtgtgaagcagctccgcgtgctcttgttcgattatgtggggctgacgccgactggtaagcttacggatacaggagcggatagcacggatgctgaggcgctgaacgagttagcgactcagcatccgattgctaagacgctcctggagatccgtaagcttaccaagttgatctccacttatgtggagaagatccttctgtcgatcgatgctgatgggtgcatccggacggggtttcatgagcacatgaccacgtccgggcgcctcagcagtagtgggaagctgaaccttcagcagctcccacgcgatgagtcgataatcaaggggtgcgtggtcgcaccccctggttatcgagtcatcgcgtgggatctcactactgctgaggtgtactacgccgcggtcctcagcggcgacaggaacatgcagcaggtgttcatcaacatgcgtaatgagccggataagtatccggacttccacagcaacatcgcgcatatggtgttcaagctgcagtgcgagccacgtgatgtcaagaagctgtttccagcgcttcggcaggcggcgaaggccattacgttcggtatactctatggcagtgggccagcgaaggtggcccactccgtcaacgaggcactcctcgagcaggccgccaagactggcgagccgttcgtggagtgcaccgttgcggatgccaaggagtatatcgaaacgtactttggccagttcccgcagctgaagcgctggatagataaatgccatgatcagatcaagaatcatggctttatctacagccattttggtcgcaaacggcggcttcataatatccatagcgaggatcgcggagtccagggcgaagagattcgctctggattcaacgcgatcatccagagcgctagttccgactccctcctcctcggcgctgtcgatgccgacaacgagatcatcagtcttggtctcgagcaggagatgaagattgtgatgctcgtgcacgatagcgtggtcgctatcgtgcgtgaggatctcattgaccagtacaatgagatcctcattcggaacatccagaaggatcgagggatctcgatccctggatgtccgatcggcatcgacagcgactccgaggcaggagggagtcgggactacagctgtggaaagatgaagaagcagcacccttccatagcgtgtatagacgacgacgagtatacacgctatgtgaagggtgtgcttcttgatgccgagttcgagtacaagaagttggccgctatggataaggagcaccccgaccactccaagtataaggatgacaagtttatcgcggtctgcaaagacctcgataatgtcaaacgtatacttggagctggcgggggctccggcaagcgcaccgctgacggctccggggggggctctccgaagaagaagcggaaggtgcccgctgcgaagcgggtaaagcttgattgactagcaccagcctcaagaacacccgaatggagtctctaagctacataataccaacttacactttacaaaatgttgtcccccaaaatgtagccattcgtatctgctcctaataaaaagaaagtttcttcacattctctcgagaaaaaaaaaaaatggaaaaaaaaaaaacggaaaaaaaaaaaaggtaaaaaaaaaaaatataaaaaaaaaaaacataaaaaaaaaaaacgaaaaaaaaaaaacgtaaaaaaaaaaaactcaaaaaaaaaaaagataaaaaaaaaaaacctaaaaaaaaaaaatgtaaaaaaaaaaaagggaaaaaaaaaaaacgcaaaaaaaaaaaacacaaaaaaaaaaaatgcaaaaaaaaaaaatcgaaaaaaaaaaaatctaaaaaaaaaaaacgaaaaaaaaaaaacccaaaaaaaaaaaagacaaaaaaaaaaaatagaaaaaaaaaaagttaaaaaaaaaaaactgaaaaaaaaaaaatttaaaaaaaaaaaatctag

SEQ ID NO: 2611 - DNA, 7522 bp, synthetic construct
  misc_feature 1..7522: note = Synthetic
  source 1..7522: mol_type = other DNA
aggaagctcagaataaacgctcaactttggccggatctgccaccatgaagcggcccgccgccaccaagaaggccggccaggccaagaagaagaaggacaagaagtactccatcggcctggacatcggcaccaactccgtgggctgggccgtgatcaccgacgagtacaaggtgccctccaagaagttcaaggtgctgggcaacaccgaccggcactccatcaagaagaacctgatcggcgccctgctgttcgactccggcgagaccgccgaggccacccggctgaagcggaccgcccggcggcggtacacccggcggaagaaccggatctgctacctgcaggagatcttctccaacgagatggccaaggtggacgactccttcttccaccggctggaggagtccttcctggtggaggaggacaagaagcacgagcggcaccccatcttcggcaacatcgtggacgaggtggcctaccacgagaagtaccccaccatctaccacctgcggaagaagctggtggactccaccgacaaggccgacctgcggctgatctacctggccctggcccacatgatcaagttccggggccacttcctgatcgagggcgacctgaaccccgacaactccgacgtggacaagctgttcatccagctggtgcagacctacaaccagctgttcgaggagaaccccatcaacgcctccggcgtggacgccaaggccatcctgtccgcccggctgtccaagtcccggcggctggagaacctgatcgcccagctgcccggcgagaagaagaacggcctgttcggcaacctgatcgccctgtccctgggcctgacccccaacttcaagtccaacttcgacctggccgaggacgccaagctgcagctgtccaaggacacctacgacgacgacctggacaacctgctggcccagatcggcgaccagtacgccgacctgttcctggccgccaagaacctgtccgacgccatcctgctgtccgacatcctgcgggtgaacaccgagatcaccaaggcccccctgtccgcctccatgatcaagcggtacgacgagcaccaccaggacctgaccctgctgaaggccctggtgcggcagcagctgcccgagaagtacaaggagatcttcttcgaccagtccaagaacggctacgccggctacatcgacggcggcgcctcccaggaggagttctacaagttcatcaagcccatcctggagaagatggacggcaccgaggagctgctggtgaagctgaaccgggaggacctgctgcggaagcagcggaccttcgacaacggctccatcccccaccagatccacctgggcgagctgcacgccatcctgcggcggcaggaggacttctaccccttcctgaaggacaaccgggagaagatcgagaagatcctgaccttccggatcccctactacgtgggccccctggcccggggcaactcccggttcgcctggatgacccggaagtccgaggagaccatcaccccctggaacttcgaggaggtggtggacaagggcgcctccgcccagtccttcatcgagcggatgaccaacttcgacaagaacctgcccaacgagaaggtgctgcccaagcactccctgctgtacgagtacttcaccgtgtacaacgagctgaccaaggtgaagtacgtgaccgagggcatgcggaagcccgccttcctgtccggcgagcagaagaaggccatcgtggacctgctgttcaagaccaaccggaaggtgaccgtgaagcagctgaaggaggactacttcaagaagatcgagtgcttcgactccgtggagatctccggcgtggaggaccggttcaacgcctccctgggcacctaccacgacctgctgaagatcatcaaggacaaggacttcctggacaacgaggagaacgaggacatcctggaggacatcgtgctgaccctgaccctgttcgaggaccgggagatgatcgaggagcggctgaagacctacgcccacctgttcgacgacaaggtgatgaagcagctgaagcggcggcggtacaccggctggggccggctgtcccggaagctgatcaacggcatccgggacaagcagtccggcaagaccatcctggacttcctgaagtccgacggcttcgccaaccggaacttcatgcagctgatccacgacgactccctgaccttcaaggaggacatccagaaggcccaggtgtccggccagggcgactccctgcacgagcacatcgccaacctggccggctcccccgccatcaagaagggcatcctgcagaccgtgaaggtggtggacgagctggtgaaggtgatgggccggcacaagcccgagaacatcgtgatcgagatggcccgggagaaccagaccacccagaagggccagaagaactcccgggagcggatgaagcggatcgaggagggcatcaaggagctgggctcccagatcctgaaggagcaccccgtggagaacacccagctgcagaacgagaagctgtacctgtactacctgcagaacggccgggacatgtacgtggaccaggagctggacatcaaccggctgtccgactacgacgtggacgccatcgtgccccagtccttcctgaaggacgactccatcgacaacaaggtgctgacccggtccgacaagaaccggggcaagtccgacaacgtgccctccgaggaggtggtgaagaagatgaagaactactggcggcagctgctgaacgccaagctgatcacccagcggaagttcgacaacctgaccaaggccgagcggggcggcctgtccgagctggacaaggccggcttcatcaagcggcagctggtggagacccggcagatcaccaagcacgtggcccagatcctggactcccggatgaacaccaagtacgacgagaacgacaagctgatccgggaggtgaaggtgatcaccctgaagtccaagctggtgtccgacttccggaaggacttccagttctacaaggtgcgggagatcaacaactaccaccacgcccacgacgcctacctgaacgccgtggtgggcaccgccctgatcaagaagtaccccaagctggagtccgagttcgtgtacggcgactacaaggtgtacgacgtgcggaagatgatcgccaagtccgagcaggagatcggcaaggccaccgccaagtacttcttctactccaacatcatgaacttcttcaagaccgagatcaccctggccaacggcgagatccggaagcggcccctgatcgagaccaacggcgagaccggcgagatcgtgtgggacaagggccgggacttcgccaccgtgcggaaggtgctgtccatgccccaggtgaacatcgtgaagaagaccgaggtgcagaccggcggcttctccaaggagtccatcctgcccaagcggaactccgacaagctgatcgcccggaagaaggactgggaccccaagaagtacggcggcttcgactcccccaccgtggcctactccgtgctggtggtggccaaggtggagaagggcaagtccaagaagctgaagtccgtgaaggagctgctgggcatcaccatcatggagcggtcctccttcgagaagaaccccatcgacttcctggaggccaagggctacaaggaggtgaagaaggacctgatcatcaagctgcccaagtactccctgttcgagctggagaacggccggaagcggatgctggcctccgccggcgagctgcagaagggcaacgagctggccctgccctccaagtacgtgaacttcctgtacctggcctcccactacgagaagctgaagggctcccccgaggacaacgagcagaagcagctgttcgtggagcagcacaagcactacctggacgagatcatcgagcagatctccgagttctccaagcgggtgatcctggccgacgccaacctggacaaggtgctgtccgcctacaacaagcaccgggacaagcccatccgggagcaggccgagaacatcatccacctgttcaccctgaccaacctgggcgcccccgccgccttcaagtacttcgacaccaccatcgaccggaagcggtacacctccaccaaggaggtgctggacgccaccctgatccaccagtccatcaccggcctgtacgagacccggatcgacctgtcccagctgggcggcgacggcgcccccgagtccgccaccgagtccggcggcacctccaccgagtccgagggctccgccggccccaagaagaagcggaaggtgacctccaccgagtccgagggctccgccggctccgccggctccacctccggctcctcctccggcatgaagatcgccgtggtggacaaggccctgaacaacacccggtacgacaagcacttccagctgtacggcgaggaggtggacgtgttccacatgtgcaacgagaagctgtccggccggctgctgaagaagcacatcaccatcggcacccccgagaaccccttcgaccccaacgactacgacttcgtgatcctggtgggcgccgagcccttcctgtacttcgccggcaagaagggcatcggcgactacaccggcaagcgggtggagtacaacggctacgccaactggatcgcctccatctcccccgcccagctgcacttcaagcccgagatgaagcccgtgttcgacgccaccgtggagaacatccacgacatcatcaacggccgggagaagatcgccaaggccggcgactaccggcccatcaccgaccccgacgaggccgaggagtacatcaagatggtgtacaacatggtgatcggccccgtggccttcgcctccgccacctccgccctgtactgccgggacggctacctgctgggcgtgtccatctcccaccaggagtaccagggcgtgtacatcgactccgactgcctgaccgaggtggccgtgtactacctgcagaagatcctggactccgagaaccacaccatcgtgttccacaacctgaagttcgacatgcacttctacaagtaccacctgggcctgaccttcgacaaggcccacaaggagcggcggctgcacgacaccatgctgcagcactacgtgctggacgagcggcggggcacccacggcctgaagtccctggccatgaagtacaccgacatgggcgactacgacttcgagctggacaagttcaaggacgactactgcaaggcccacaagatcaagaaggaggacttcacctacgacctgatccccttcgacatcatgtggccctacgccgccaaggacaccgacgccaccatccggctgcacaacttcttcctgcccaagatcgagaagaacgagaagctgtgctccctgtactacgacgtgctgatgcccggctgcgtgttcctgcagcgggtggaggaccggggcgtgcccatctccatcgaccggctgaaggaggcccagtaccagctgacccacaacctgaacaaggcccgggagaagctgtacacctaccccgaggtgaagcagctggagcaggaccagaacgaggccttcaaccccaactccgtgaagcagctgcgggtgctgctgttcgactacgtgggcctgacccccaccggcaagctgaccgacaccggcgccgactccaccgacgccgaggccctgaacgagctggccacccagcaccccatcgccaagaccctgctggagatccggaagctgaccaagctgatctccacctacgtggagaagatcctgctgtccatcgacgccgacggctgcatccggaccggcttccacgagcacatgaccacctccggccggctgtcctcctccggcaagctgaacctgcagcagctgccccgggacgagtccatcatcaagggctgcgtggtggccccccccggctaccgggtgatcgcctgggacctgaccaccgccgaggtgtactacgccgccgtgctgtccggcgaccggaacatgcagcaggtgttcatcaacatgcggaacgagcccgacaagtaccccgacttccactccaacatcgcccacatggtgttcaagctgcagtgcgagccccgggacgtgaagaagctgttccccgccctgcggcaggccgccaaggccatcaccttcggcatcctgtacggctccggccccgccaaggtggcccactccgtgaacgaggccctgctggagcaggccgccaagaccggcgagcccttcgtggagtgcaccgtggccgacgccaaggagtacatcgagacctacttcggccagttcccccagctgaagcggtggatcgacaagtgccacgaccagatcaagaaccacggcttcatctactcccacttcggccggaagcggcggctgcacaacatccactccgaggaccggggcgtgcagggcgaggagatccggtccggcttcaacgccatcatccagtccgcctcctccgactccctgctgctgggcgccgtggacgccgacaacgagatcatctccctgggcctggagcaggagatgaagatcgtgatgctggtgcacgactccgtggtggccatcgtgcgggaggacctgatcgaccagtacaacgagatcctgatccggaacatccagaaggaccggggcatctccatccccggctgccccatcggcatcgactccgactccgaggccggcggctcccgggactactcctgcggcaagatgaagaagcagcacccctccatcgcctgcatcgacgacgacgagtacacccggtacgtgaagggcgtgctgctggacgccgagttcgagtacaagaagctggccgccatggacaaggagcaccccgaccactccaagtacaaggacgacaagttcatcgccgtgtgcaaggacctggacaacgtgaagcggatcctgggcgcctccggctccgagacccccggcacctccgagtccgccacccccgagtcccccaagaagaagcggaaggtgcctgccgctaagagagtgaagctggactagctagcaccagcctcaagaacacccgaatggagtctctaagctacataataccaacttacactttacaaaatgttgtcccccaaaatgtagccattcgtatctgctcctaataaaaagaaagtttcttcacattctctcgagaaaaaaaaaaaatggaaaaaaaaaaaacggaaaaaaaaaaaaggtaaaaaaaaaaaatataaaaaaaaaaaacataaaaaaaaaaaacgaaaaaaaaaaaacgtaaaaaaaaaaaactcaaaaaaaaaaaagataaaaaaaaaaaacctaaaaaaaaaaaatgtaaaaaaaaaaaagggaaaaaaaaaaaacgcaaaaaaaaaaaacacaaaaaaaaaaaatgcaaaaaaaaaaaatcgaaaaaaaaaaaatctaaaaaaaaaaaacgaaaaaaaaaaaacccaaaaaaaaaaaagacaaaaaaaaaaaatagaaaaaaaaaaagttaaaaaaaaaaaactgaaaaaaaaaaaatttaaaaaaaaaaaatctag

SEQ ID NO: 2612 - DNA, 7492 bp, synthetic construct
  misc_feature 1..7492: note = Synthetic
  source 1..7492: mol_type = other DNA
aggaagctcagaataaacgctcaactttggccggatctgccaccatgaagcggcccgccgccaccaagaaggccggccaggccaagaagaagaaggacaagaagtactccatcggcctggacatcggcaccaactccgtgggctgggccgtgatcaccgacgagtacaaggtgccctccaagaagttcaaggtgctgggcaacaccgaccggcactccatcaagaagaacctgatcggcgccctgctgttcgactccggcgagaccgccgaggccacccggctgaagcggaccgcccggcggcggtacacccggcggaagaaccggatctgctacctgcaggagatcttctccaacgagatggccaaggtggacgactccttcttccaccggctggaggagtccttcctggtggaggaggacaagaagcacgagcggcaccccatcttcggcaacatcgtggacgaggtggcctaccacgagaagtaccccaccatctaccacctgcggaagaagctggtggactccaccgacaaggccgacctgcggctgatctacctggccctggcccacatgatcaagttccggggccacttcctgatcgagggcgacctgaaccccgacaactccgacgtggacaagctgttcatccagctggtgcagacctacaaccagctgttcgaggagaaccccatcaacgcctccggcgtggacgccaaggccatcctgtccgcccggctgtccaagtcccggcggctggagaacctgatcgcccagctgcccggcgagaagaagaacggcctgttcggcaacctgatcgccctgtccctgggcctgacccccaacttcaagtccaacttcgacctggccgaggacgccaagctgcagctgtccaaggacacctacgacgacgacctggacaacctgctggcccagatcggcgaccagtacgccgacctgttcctggccgccaagaacctgtccgacgccatcctgctgtccgacatcctgcgggtgaacaccgagatcaccaaggcccccctgtccgcctccatgatcaagcggtacgacgagcaccaccaggacctgaccctgctgaaggccctggtgcggcagcagctgcccgagaagtacaaggagatcttcttcgaccagtccaagaacggctacgccggctacatcgacggcggcgcctcccaggaggagttctacaagttcatcaagcccatcctggagaagatggacggcaccgaggagctgctggtgaagctgaaccgggaggacctgctgcggaagcagcggaccttcgacaacggctccatcccccaccagatccacctgggcgagctgcacgccatcctgcggcggcaggaggacttctaccccttcctgaaggacaaccgggagaagatcgagaagatcctgaccttccggatcccctactacgtgggccccctggcccggggcaactcccggttcgcctggatgacccggaagtccgaggagaccatcaccccctggaacttcgaggaggtggtggacaagggcgcctccgcccagtccttcatcgagcggatgaccaacttcgacaagaacctgcccaacgagaaggtgctgcccaagcactccctgctgtacgagtacttcaccgtgtacaacgagctgaccaaggtgaagtacgtgaccgagggcatgcggaagcccgccttcctgtccggcgagcagaagaaggccatcgtggacctgctgttcaagaccaaccggaaggtgaccgtgaagcagctgaaggaggactacttcaagaagatcgagtgcttcgactccgtggagatctccggcgtggaggaccggttcaacgcctccctgggcacctaccacgacctgctgaagatcatcaaggacaaggacttcctggacaacgaggagaacgaggacatcctggaggacatcgtgctgaccctgaccctgttcgaggaccgggagatgatcgaggagcggctgaagacctacgcccacctgttcgacgacaaggtgatgaagcagctgaagcggcggcggtacaccggctggggccggctgtcccggaagctgatcaacggcatccgggacaagcagtccggcaagaccatcctggacttcctgaagtccgacggcttcgccaaccggaacttcatgcagctgatccacgacgactccctgaccttcaaggaggacatccagaaggcccaggtgtccggccagggcgactccctgcacgagcacatcgccaacctggccggctcccccgccatcaagaagggcatcctgcagaccgtgaaggtggtggacgagctggtgaaggtgatgggccggcacaagcccgagaacatcgtgatcgagatggcccgggagaaccagaccacccagaagggccagaagaactcccgggagcggatgaagcggatcgaggagggcatcaaggagctgggctcccagatcctgaaggagcaccccgtggagaacacccagctgcagaacgagaagctgtacctgtactacctgcagaacggccgggacatgtacgtggaccaggagctggacatcaaccggctgtccgactacgacgtggacgccatcgtgccccagtccttcctgaaggacgactccatcgacaacaaggtgctgacccggtccgacaagaaccggggcaagtccgacaacgtgccctccgaggaggtggtgaagaagatgaagaactactggcggcagctgctgaacgccaagctgatcacccagcggaagttcgacaacctgaccaaggccgagcggggcggcctgtccgagctggacaaggccggcttcatcaagcggcagctggtggagacccggcagatcaccaagcacgtggcccagatcctggactcccggatgaacaccaagtacgacgagaacgacaagctgatccgggaggtgaaggtgatcaccctgaagtccaagctggtgtccgacttccggaaggacttccagttctacaaggtgcgggagatcaacaactaccaccacgcccacgacgcctacctgaacgccgtggtgggcaccgccctgatcaagaagtaccccaagctggagtccgagttcgtgtacggcgactacaaggtgtacgacgtgcggaagatgatcgccaagtccgagcaggagatcggcaaggccaccgccaagtacttcttctactccaacatcatgaacttcttcaagaccgagatcaccctggccaacggcgagatccggaagcggcccctgatcgagaccaacggcgagaccggcgagatcgtgtgggacaagggccgggacttcgccaccgtgcggaaggtgctgtccatgccccaggtgaacatcgtgaagaagaccgaggtgcagaccggcggcttctccaaggagtccatcctgcccaagcggaactccgacaagctgatcgcccggaagaaggactgggaccccaagaagtacggcggcttcgactcccccaccgtggcctactccgtgctggtggtggccaaggtggagaagggcaagtccaagaagctgaagtccgtgaaggagctgctgggcatcaccatcatggagcggtcctccttcgagaagaaccccatcgacttcctggaggccaagggctacaaggaggtgaagaaggacctgatcatcaagctgcccaagtactccctgttcgagctggagaacggccggaagcggatgctggcctccgccggcgagctgcagaagggcaacgagctggccctgccctccaagtacgtgaacttcctgtacctggcctcccactacgagaagctgaagggctcccccgaggacaacgagcagaagcagctgttcgtggagcagcacaagcactacctggacgagatcatcgagcagatctccgagttctccaagcgggtgatcctggccgacgccaacctggacaaggtgctgtccgcctacaacaagcaccgggacaagcccatccgggagcaggccgagaacatcatccacctgttcaccctgaccaacctgggcgcccccgccgccttcaagtacttcgacaccaccatcgaccggaagcggtacacctccaccaaggaggtgctggacgccaccctgatccaccagtccatcaccggcctgtacgagacccggatcgacctgtcccagctgggcggcgacggtaccaaggacagcaccaaagatatcccggaaaccccgagcaaggaccccaagaagaagcggaaggtgggtaccaaggacagcaccaaagatatcccggaaaccccgagcaaggacatgaagatcgccgtggtggacaaggccctgaacaacacccggtacgacaagcacttccagctgtacggcgaggaggtggacgtgttccacatgtgcaacgagaagctgtccggccggctgctgaagaagcacatcaccatcggcacccccgagaaccccttcgaccccaacgactacgacttcgtgatcctggtgggcgccgagcccttcctgtacttcgccggcaagaagggcatcggcgactacaccggcaagcgggtggagtacaacggctacgccaactggatcgcctccatctcccccgcccagctgcacttcaagcccgagatgaagcccgtgttcgacgccaccgtggagaacatccacgacatcatcaacggccgggagaagatcgccaaggccggcgactaccggcccatcaccgaccccgacgaggccgaggagtacatcaagatggtgtacaacatggtgatcggccccgtggccttcgcctccgccacctccgccctgtactgccgggacggctacctgctgggcgtgtccatctcccaccaggagtaccagggcgtgtacatcgactccgactgcctgaccgaggtggccgtgtactacctgcagaagatcctggactccgagaaccacaccatcgtgttccacaacctgaagttcgacatgcacttctacaagtaccacctgggcctgaccttcgacaaggcccacaaggagcggcggctgcacgacaccatgctgcagcactacgtgctggacgagcggcggggcacccacggcctgaagtccctggccatgaagtacaccgacatgggcgactacgacttcgagctggacaagttcaaggacgactactgcaaggcccacaagatcaagaaggaggacttcacctacgacctgatccccttcgacatcatgtggccctacgccgccaaggacaccgacgccaccatccggctgcacaacttcttcctgcccaagatcgagaagaacgagaagctgtgctccctgtactacgacgtgctgatgcccggctgcgtgttcctgcagcgggtggaggaccggggcgtgcccatctccatcgaccggctgaaggaggcccagtaccagctgacccacaacctgaacaaggcccgggagaagctgtacacctaccccgaggtgaagcagctggagcaggaccagaacgaggccttcaaccccaactccgtgaagcagctgcgggtgctgctgttcgactacgtgggcctgacccccaccggcaagctgaccgacaccggcgccgactccaccgacgccgaggccctgaacgagctggccacccagcaccccatcgccaagaccctgctggagatccggaagctgaccaagctgatctccacctacgtggagaagatcctgctgtccatcgacgccgacggctgcatccggaccggcttccacgagcacatgaccacctccggccggctgtcctcctccggcaagctgaacctgcagcagctgccccgggacgagtccatcatcaagggctgcgtggtggccccccccggctaccgggtgatcgcctgggacctgaccaccgccgaggtgtactacgccgccgtgctgtccggcgaccggaacatgcagcaggtgttcatcaacatgcggaacgagcccgacaagtaccccgacttccactccaacatcgcccacatggtgttcaagctgcagtgcgagccccgggacgtgaagaagctgttccccgccctgcggcaggccgccaaggccatcaccttcggcatcctgtacggctccggccccgccaaggtggcccactccgtgaacgaggccctgctggagcaggccgccaagaccggcgagcccttcgtggagtgcaccgtggccgacgccaaggagtacatcgagacctacttcggccagttcccccagctgaagcggtggatcgacaagtgccacgaccagatcaagaaccacggcttcatctactcccacttcggccggaagcggcggctgcacaacatccactccgaggaccggggcgtgcagggcgaggagatccggtccggcttcaacgccatcatccagtccgcctcctccgactccctgctgctgggcgccgtggacgccgacaacgagatcatctccctgggcctggagcaggagatgaagatcgtgatgctggtgcacgactccgtggtggccatcgtgcgggaggacctgatcgaccagtacaacgagatcctgatccggaacatccagaaggaccggggcatctccatccccggctgccccatcggcatcgactccgactccgaggccggcggctcccgggactactcctgcggcaagatgaagaagcagcacccctccatcgcctgcatcgacgacgacgagtacacccggtacgtgaagggcgtgctgctggacgccgagttcgagtacaagaagctggccgccatggacaaggagcaccccgaccactccaagtacaaggacgacaagttcatcgccgtgtgcaaggacctggacaacgtgaagcggatcctgggcgcctccggctccgagacccccggcacctccgagtccgccacccccgagtcccccaagaagaagcggaaggtgcctgccgctaagagagtgaagctggactagctagcaccagcctcaagaacacccgaatggagtctctaagctacataataccaacttacactttacaaaatgttgtcccccaaaatgtagccattcgtatctgctcctaataaaaagaaagtttcttcacattctctcgagaaaaaaaaaaaatggaaaaaaaaaaaacggaaaaaaaaaaaaggtaaaaaaaaaaaatataaaaaaaaaaaacataaaaaaaaaaaacgaaaaaaaaaaaacgtaaaaaaaaaaaactcaaaaaaaaaaaagataaaaaaaaaaaacctaaaaaaaaaaaatgtaaaaaaaaaaaagggaaaaaaaaaaaacgcaaaaaaaaaaaacacaaaaaaaaaaaatgcaaaaaaaaaaaatcgaaaaaaaaaaaatctaaaaaaaaaaaacgaaaaaaaaaaaacccaaaaaaaaaaaagacaaaaaaaaaaaatagaaaaaaaaaaagttaaaaaaaaaaaactgaaaaaaaaaaaatttaaaaaaaaaaaatctag

SEQ ID NO: 2613 - DNA, 7694 bp, synthetic construct; identical to SEQ ID NO: 2528
  misc_feature 1..7694: note = Synthetic
  source 1..7694: mol_type = other DNA

SEQ ID NO: 2614 - DNA, 7694 bp, synthetic construct; identical to SEQ ID NO: 2529
  misc_feature 1..7694: note = Synthetic
  source 1..7694: mol_type = other DNA

SEQ ID NO: 2615 - DNA, 7694 bp, synthetic construct; identical to SEQ ID NO: 2530
  misc_feature 1..7694: note = Synthetic
  source 1..7694: mol_type = other DNA

SEQ ID NO: 2616 - DNA, 7562 bp, synthetic construct; identical to SEQ ID NO: 2531
  misc_feature 1..7562: note = Synthetic
  source 1..7562: mol_type = other DNA

SEQ ID NO: 2617 - DNA, 7691 bp, synthetic construct; identical to SEQ ID NO: 2532
  misc_feature 1..7691: note = Synthetic
  source 1..7691: mol_type = other DNA

SEQ ID NO: 2618 - DNA, 7585 bp, synthetic construct; identical to SEQ ID NO: 2533
  misc_feature 1..7585: note = Synthetic
  source 1..7585: mol_type = other DNA

SEQ ID NO: 2619 - DNA, 7555 bp, synthetic construct; identical to SEQ ID NO: 2534
  misc_feature 1..7555: note = Synthetic
  source 1..7555: mol_type = other DNA

SEQ ID NO: 2620 - DNA, 7505 bp, synthetic construct; identical to SEQ ID NO: 2535
  misc_feature 1..7505: note = Synthetic
  source 1..7505: mol_type = other DNA

SEQ ID NO: 2621 - DNA, 7522 bp, synthetic construct
  misc_feature 1..7522: note = Synthetic
  source 1..7522: mol_type = other DNA
aggaagctcagaataaacgctcaactttggccggatctgccaccatgaaacgacccgccgccaccaagaaagcaggacaagctaagaagaagaaggacaagaagtactccatcggcctggacatcggcaccaactccgtgggctgggccgtgatcaccgacgagtacaaggtgccctccaagaagttcaaggtgctgggcaacaccgaccggcactccatcaagaagaacctgatcggcgccctgctgttcgactccggcgagaccgccgaggccacccggctgaagcggaccgcccggcggcggtacacccggcggaagaaccggatctgctacctgcaggagatcttctccaacgagatggccaaggtggacgactccttcttccaccggctggaggagtccttcctggtggaggaggacaagaagcacgagcggcaccccatcttcggcaacatcgtggacgaggtggcctaccacgagaagtaccccaccatctaccacctgcggaagaagctggtggactccaccgacaaggccgacctgcggctgatctacctggccctggcccacatgatcaagttccggggccacttcctgatcgagggcgacctgaaccccgacaactccgacgtggacaagctgttcatccagctggtgcagacctacaaccagctgttcgaggagaaccccatcaacgcctccggcgtggacgccaaggccatcctgtccgcccggctgtccaagtcccggcggctggagaacctgatcgcccagctgcccggcgagaagaagaacggcctgttcggcaacctgatcgccctgtccctgggcctgacccccaacttcaagtccaacttcgacctggccgaggacgccaagctgcagctgtccaaggacacctacgacgacgacctggacaacctgctggcccagatcggcgaccagtacgccgacctgttcctggccgccaagaacctgtccgacgccatcctgctgtccgacatcctgcgggtgaacaccgagatcaccaaggcccccctgtccgcctccatgatcaagcggtacgacgagcaccaccaggacctgaccctgctgaaggccctggtgcggcagcagctgcccgagaagtacaaggagatcttcttcgaccagtccaagaacggctacgccggctacatcgacggcggcgcctcccaggaggagttctacaagttcatcaagcccatcctggagaagatggacggcaccgaggagctgctggtgaagctgaaccgggaggacctgctgcggaagcagcggaccttcgacaacggctccatcccccaccagatccacctgggcgagctgcacgccatcctgcggcggcaggaggacttctaccccttcctgaaggacaaccgggagaagatcgagaagatcctgaccttccggatcccctactacgtgggccccctggcccggggcaactcccggttcgcctggatgacccggaagtccgaggagaccatcaccccctggaacttcgaggaggtggtggacaagggcgcctccgcccagtccttcatcgagcggatgaccaacttcgacaagaacctgcccaacgagaaggtgctgcccaagcactccctgctgtacgagtacttcaccgtgtacaacgagctgaccaaggtgaagtacgtgaccgagggcatgcggaagcccgccttcctgtccggcgagcagaagaaggccatcgtggacctgctgttcaagaccaaccggaaggtgaccgtgaagcagctgaaggaggactacttcaagaagatcgagtgcttcgactccgtggagatctccggcgtggaggaccggttcaacgcctccctgggcacctaccacgacctgctgaagatcatcaaggacaaggacttcctggacaacgaggagaacgaggacatcctggaggacatcgtgctgaccctgaccctgttcgaggaccgggagatgatcgaggagcggctgaagacctacgcccacctgttcgacgacaaggtgatgaagcagctgaagcggcggcggtacaccggctggggccggctgtcccggaagctgatcaacggcatccgggacaagcagtccggcaagaccatcctggacttcctgaagtccgacggcttcgccaaccggaacttcatgcagctgatccacgacgactccctgaccttcaaggaggacatccagaaggcccaggtgtccggccagggcgactccctgcacgagcacatcgccaacctggccggctcccccgccatcaagaagggcatcctgcagaccgtgaaggtggtggacgagctggtgaaggtgatgggccggcacaagcccgagaacatcgtgatcgagatggcccgggagaaccagaccacccagaagggccagaagaactcccgggagcggatgaagcggatcgaggagggcatcaaggagctgggctcccagatcctgaaggagcaccccgtggagaacacccagctgcagaacgagaagctgtacctgtactacctgcagaacggccgggacatgtacgtggaccaggagctggacatcaaccggctgtccgactacgacgtggacgccatcgtgccccagtccttcctgaaggacgactccatcgacaacaaggtgctgacccggtccgacaagaaccggggcaagtccgacaacgtgccctccgaggaggtggtgaagaagatgaagaactactggcggcagctgctgaacgccaagctgatcacccagcggaagttcgacaacctgaccaaggccgagcggggcggcctgtccgagctggacaaggccggcttcatcaagcggcagctggtggagacccggcagatcaccaagcacgtggcccagatcctggactcccggatgaacaccaagtacgacgagaacgacaagctgatccgggaggtgaaggtgatcaccctgaagtccaagctggtgtccgacttccggaaggacttccagttctacaaggtgcgggagatcaacaactaccaccacgcccacgacgcctacctgaacgccgtggtgggcaccgccctgatcaagaagtaccccaagctggagtccgagttcgtgtacggcgactacaaggtgtacgacgtgcggaagatgatcgccaagtccgagcaggagatcggcaaggccaccgccaagtacttcttctactccaacatcatgaacttcttcaagaccgagatcaccctggccaacggcgagatccggaagcggcccctgatcgagaccaacggcgagaccggcgagatcgtgtgggacaagggccgggacttcgccaccgtgcggaaggtgctgtccatgccccaggtgaacatcgtgaagaagaccgaggtgcagaccggcggcttctccaaggagtccatcctgcccaagcggaactccgacaagctgatcgcccggaagaaggactgggaccccaagaagtacggcggcttcgactcccccaccgtggcctactccgtgctggtggtggccaaggtggagaagggcaagtccaagaagctgaagtccgtgaaggagctgctgggcatcaccatcatggagcggtcctccttcgagaagaaccccatcgacttcctggaggccaagggctacaaggaggtgaagaaggacctgatcatcaagctgcccaagtactccctgttcgagctggagaacggccggaagcggatgctggcctccgccggcgagctgcagaagggcaacgagctggccctgccctccaagtacgtgaacttcctgtacctggcctcccactacgagaagctgaagggctcccccgaggacaacgagcagaagcagctgttcgtggagcagcacaagcactacctggacgagatcatcgagcagatctccgagttctccaagcgggtgatcctggccgacgccaacctggacaaggtgctgtccgcctacaacaagcaccgggacaagcccatccgggagcaggccgagaacatcatccacctgttcaccctgaccaacctgggcgcccccgccgccttcaagtacttcgacaccaccatcgaccggaagcggtacacctccaccaaggaggtgctggacgccaccctgatccaccagtccatcaccggcctgtacgagacccggatcgacctgtcccagctgggcggcgacggcgcccccgagtccgccaccgagtccggcggcacctccaccgagtccgagggctccgccggccccaagaagaagcggaaggtgacctccaccgagtccgagggctccgccggctccgccggctccacctccggctcctcctccggcatgaagatcgccgtggtggacaaggccctgaacaacacccggtacgacaagcacttccagctgtacggcgaggaggtggacgtgttccacatgtgcaacgagaagctgtccggccggctgctgaagaagcacatcaccatcggcacccccgagaaccccttcgaccccaacgactacgacttcgtgatcctggtgggcgccgagcccttcctgtacttcgccggcaagaagggcatcggcgactacaccggcaagcgggtggagtacaacggctacgccaactggatcgcctccatctcccccgcccagctgcacttcaagcccgagatgaagcccgtgttcgacgccaccgtggagaacatccacgacatcatcaacggccgggagaagatcgccaaggccggcgactaccggcccatcaccgaccccgacgaggccgaggagtacatcaagatggtgtacaacatggtgatcggccccgtggccttcgcctccgccacctccgccctgtactgccgggacggctacctgctgggcgtgtccatctcccaccaggagtaccagggcgtgtacatcgactccgactgcctgaccgaggtggccgtgtactacctgcagaagatcctggactccgagaaccacaccatcgtgttccacaacctgaagttcgacatgcacttctacaagtaccacctgggcctgaccttcgacaaggcccacaaggagcggcggctgcacgacaccatgctgcagcactacgtgctggacgagcggcggggcacccacggcctgaagtccctggccatgaagtacaccgacatgggcgactacgacttcgagctggacaagttcaaggacgactactgcaaggcccacaagatcaagaaggaggacttcacctacgacctgatccccttcgacatcatgtggccctacgccgccaaggacaccgacgccaccatccggctgcacaacttcttcctgcccaagatcgagaagaacgagaagctgtgctccctgtactacgacgtgctgatgcccggctgcgtgttcctgcagcgggtggaggaccggggcgtgcccatctccatcgaccggctgaaggaggcccagtaccagctgacccacaacctgaacaaggcccgggagaagctgtacacctaccccgaggtgaagcagctggagcaggaccagaacgaggccttcaaccccaactccgtgaagcagctgcgggtgctgctgttcgactacgtgggcctgacccccaccggcaagctgaccgacaccggcgccgactccaccgacgccgaggccctgaacgagctggccacccagcaccccatcgccaagaccctgctggagatccggaagctgaccaagctgatctccacctacgtggagaagatcctgctgtccatcgacgccgacggctgcatccggaccggcttccacgagcacatgaccacctccggccggctgtcctcctccggcaagctgaacctgcagcagctgccccgggacgagtccatcatcaagggctgcgtggtggccccccccggctaccgggtgatcgcctgggacctgaccaccgccgaggtgtactacgccgccgtgctgtccggcgaccggaacatgcagcaggtgttcatcaacatgcggaacgagcccgacaagtaccccgacttccactccaacatcgcccacatggtgttcaagctgcagtgcgagccccgggacgtgaagaagctgttccccgccctgcggcaggccgccaaggccatcaccttcggcatcctgtacggctccggccccgccaaggtggcccactccgtgaacgaggccctgctggagcaggccgccaagaccggcgagcccttcgtggagtgcaccgtggccgacgccaaggagtacatcgagacctacttcggccagttcccccagctgaagcggtggatcgacaagtgccacgaccagatcaagaaccacggcttcatctactcccacttcggccggaagcggcggctgcacaacatccactccgaggaccggggcgtgcagggcgaggagatccggtccggcttcaacgccatcatccagtccgcctcctccgactccctgctgctgggcgccgtggacgccgacaacgagatcatctccctgggcctggagcaggagatgaagatcgtgatgctggtgcacgactccgtggtggccatcgtgcgggaggacctgatcgaccagtacaacgagatcctgatccggaacatccagaaggaccggggcatctccatccccggctgccccatcggcatcgactccgactccgaggccggcggctcccgggactactcctgcggcaagatgaagaagcagcacccctccatcgcctgcatcgacgacgacgagtacacccggtacgtgaagggcgtgctgctggacgccgagttcgagtacaagaagctggccgccatggacaaggagcaccccgaccactccaagtacaaggacgacaagttcatcgccgtgtgcaaggacctggacaacgtgaagcggatcctgggcgccggcggcggctccggcaagcggaccgccgacggctccggcggcggctcccccaagaagaagcggaaggtgcctgccgctaagagagtgaagctggactagctagcaccagcctcaagaacacccgaatggagtctctaagctacataataccaacttacactttacaaaatgttgtcccccaaaatgtagccattcgtatctgctcctaataaaaagaaagtttcttcacattctctcgagaaaaaaaaaaaatggaaaaaaaaaaaacggaaaaaaaaaaaaggtaaaaaaaaaaaatataaaaaaaaaaaacataaaaaaaaaaaacgaaaaaaaaaaaacgtaaaaaaaaaaaactcaaaaaaaaaaaagataaaaaaaaaaaacctaaaaaaaaaaaatgtaaaaaaaaaaaagggaaaaaaaaaaaacgcaaaaaaaaaaaacacaaaaaaaaaaaatgcaaaaaaaaaaaatcgaaaaaaaaaaaatctaaaaaaaaaaaacgaaaaaaaaaaaacccaaaaaaaaaaaagacaaaaaaaaaaaatagaaaaaaaaaaagttaaaaaaaaaaaactgaaaaaaaaaaaatttaaaaaaaaaaaatctag

SEQ ID NO: 2622 - DNA, 6469 bp, synthetic construct
  misc_feature 1..6469: note = Synthetic
  source 1..6469: mol_type = other DNA
gggaagctcagaataaacgctcaactttggccggatctgccaccatgaagcggaccgccgacggctccgagttcgagtcccccaagaagaagcggaaggtggacaagaagtactccatcggcctggacatcggcaccaactccgtgggctgggccgtgatcaccgacgagtacaaggtgccctccaagaagttcaaggtgctgggcaacaccgaccggcactccatcaagaagaacctgatcggcgccctgctgttcgactccggcgagaccgccgaggccacccggctgaagcggaccgcccggcggcggtacacccggcggaagaaccggatctgctacctgcaggagatcttctccaacgagatggccaaggtggacgactccttcttccaccggctggaggagtccttcctggtggaggaggacaagaagcacgagcggcaccccatcttcggcaacatcgtggacgaggtggcctaccacgagaagtaccccaccatctaccacctgcggaagaagctggtggactccaccgacaaggccgacctgcggctgatctacctggccctggcccacatgatcaagttccggggccacttcctgatcgagggcgacctgaaccccgacaactccgacgtggacaagctgttcatccagctggtgcagacctacaaccagctgttcgaggagaaccccatcaacgcctccggcgtggacgccaaggccatcctgtccgcccggctgtccaagtcccggcggctggagaacctgatcgcccagctgcccggcgagaagaagaacggcctgttcggcaacctgatcgccctgtccctgggcctgacccccaacttcaagtccaacttcgacctggccgaggacgccaagctgcagctgtccaaggacacctacgacgacgacctggacaacctgctggcccagatcggcgaccagtacgccgacctgttcctggccgccaagaacctgtccgacgccatcctgctgtccgacatcctgcgggtgaacaccgagatcaccaaggcccccctgtccgcctccatgatcaagcggtacgacgagcaccaccaggacctgaccctgctgaaggccctggtgcggcagcagctgcccgagaagtacaaggagatcttcttcgaccagtccaagaacggctacgccggctacatcgacggcggcgcctcccaggaggagttctacaagttcatcaagcccatcctggagaagatggacggcaccgaggagctgctggtgaagctgaaccgggaggacctgctgcggaagcagcggaccttcgacaacggctccatcccccaccagatccacctgggcgagctgcacgccatcctgcggcggcaggaggacttctaccccttcctgaaggacaaccgggagaagatcgagaagatcctgaccttccggatcccctactacgtgggccccctggcccggggcaactcccggttcgcctggatgacccggaagtccgaggagaccatcaccccctggaacttcgaggaggtggtggacaagggcgcctccgcccagtccttcatcgagcggatgaccaacttcgacaagaacctgcccaacgagaaggtgctgcccaagcactccctgctgtacgagtacttcaccgtgtacaacgagctgaccaaggtgaagtacgtgaccgagggcatgcggaagcccgccttcctgtccggcgagcagaagaaggccatcgtggacctgctgttcaagaccaaccggaaggtgaccgtgaagcagctgaaggaggactacttcaagaagatcgagtgcttcgactccgtggagatctccggcgtggaggaccggttcaacgcctccctgggcacctaccacgacctgctgaagatcatcaaggacaaggacttcctggacaacgaggagaacgaggacatcctggaggacatcgtgctgaccctgaccctgttcgaggaccgggagatgatcgaggagcggctgaagacctacgcccacctgttcgacgacaaggtgatgaagcagctgaagcggcggcggtacaccggctggggccggctgtcccggaagctgatcaacggcatccgggacaagcagtccggcaagaccatcctggacttcctgaagtccgacggcttcgccaaccggaacttcatgcagctgatccacgacgactccctgaccttcaaggaggacatccagaaggcccaggtgtccggccagggcgactccctgcacgagcacatcgccaacctggccggctcccccgccatcaagaagggcatcctgcagaccgtgaaggtggtggacgagctggtgaaggtgatgggccggcacaagcccgagaacatcgtgatcgagatggcccgggagaaccagaccacccagaagggccagaagaactcccgggagcggatgaagcggatcgaggagggcatcaaggagctgggctcccagatcctgaaggagcaccccgtggagaacacccagctgcagaacgagaagctgtacctgtactacctgcagaacggccgggacatgtacgtggaccaggagctggacatcaaccggctgtccgactacgacgtggacgccatcgtgccccagtccttcctgaaggacgactccatcgacaacaaggtgctgacccggtccgacaagaaccggggcaagtccgacaacgtgccctccgaggaggtggtgaagaagatgaagaactactggcggcagctgctgaacgccaagctgatcacccagcggaagttcgacaacctgaccaaggccgagcggggcggcctgtccgagctggacaaggccggcttcatcaagcggcagctggtggagacccggcagatcaccaagcacgtggcccagatcctggactcccggatgaacaccaagtacgacgagaacgacaagctgatccgggaggtgaaggtgatcaccctgaagtccaagctggtgtccgacttccggaaggacttccagttctacaaggtgcgggagatcaacaactaccaccacgcccacgacgcctacctgaacgccgtggtgggcaccgccctgatcaagaagtaccccaagctggagtccgagttcgtgtacggcgactacaaggtgtacgacgtgcggaagatgatcgccaagtccgagcaggagatcggcaaggccaccgccaagtacttcttctactccaacatcatgaacttcttcaagaccgagatcaccctggccaacggcgagatccggaagcggcccctgatcgagaccaacggcgagaccggcgagatcgtgtgggacaagggccgggacttcgccaccgtgcggaaggtgctgtccatgccccaggtgaacatcgtgaagaagaccgaggtgcagaccggcggcttctccaaggagtccatcctgcccaagcggaactccgacaagctgatcgcccggaagaaggactgggaccccaagaagtacggcggcttcgactcccccaccgtggcctactccgtgctggtggtggccaaggtggagaagggcaagtccaagaagctgaagtccgtgaaggagctgctgggcatcaccatcatggagcggtcctccttcgagaagaaccccatcgacttcctggaggccaagggctacaaggaggtgaagaaggacctgatcatcaagctgcccaagtactccctgttcgagctggagaacggccggaagcggatgctggcctccgccggcgagctgcagaagggcaacgagctggccctgccctccaagtacgtgaacttcctgtacctggcctcccactacgagaagctgaagggctcccccgaggacaacgagcagaagcagctgttcgtggagcagcacaagcactacctggacgagatcatcgagcagatctccgagttctccaagcgggtgatcctggccgacgccaacctggacaaggtgctgtccgcctacaacaagcaccgggacaagcccatccgggagcaggccgagaacatcatccacctgttcaccctgaccaacctgggcgcccccgccgccttcaagtacttcgacaccaccatcgaccggaagcggtacacctccaccaaggaggtgctggacgccaccctgatccaccagtccatcaccggcctgtacgagacccggatcgacctgtcccagctgggcggcgactccggcggctcctccggcggctccaagcggaccgccgacggctccgagttcgagtcccccaagaagaagcggaaggtgtccggcggctcctccggcggctccatggactccaccaaggagaagtgcgactcctacaaggacgacctgctgctgcggatgggcctgaacgacaacaaggccggcatggagggcctggacaaggagaagatcaacaagatcatcatggaggccaccaagggctcccggttctacggcaacgagctgaagaaggagaagcaggtgaaccagcggatcgagaacatgatgcagcagaaggcccagatcacctcccagcagctgcggaaggcccagctgcaggtggaccggttcgccatggagctggagcagtcccggaacctgtccaacaccatcgtgcacatcgacatggacgccttctacgccgccgtggagatgcgggacaaccccgagctgaaggacaagcccatcgccgtgggctccatgtccatgctgtccacctccaactaccacgcccggcggttcggcgtgcgggccgccatgcccggcttcatcgccaagcggctgtgcccccagctgatcatcgtgccccccaacttcgacaagtaccgggccgtgtccaaggaggtgaaggagatcctggccgactacgaccccaacttcatggccatgtccctggacgaggcctacctgaacatcaccaagcacctggaggagcggcagaactggcccgaggacaagcggcggtacttcatcaagatgggctcctccgtggagaacgacaaccccggcaaggaggtgaacaagctgtccgagcacgagcggtccatctcccccctgctgttcgaggagtccccctccgacgtgcagccccccggcgaccccttccaggtgaacttcgaggagcagaacaacccccagatcctgcagaactccgtggtgttcggcacctccgcccaggaggtggtgaaggagatccggttccggatcgagcagaagaccaccctgaccgcctccgccggcatcgcccccaacaccatgctggccaaggtgtgctccgacaagaacaagcccaacggccagtaccagatcctgcccaaccggcaggccgtgatggacttcatcaaggacctgcccatccggaaggtgtccggcatcggcaaggtgaccgagaagatgctgaaggccctgggcatcatcacctgcaccgagctgtaccagcagcgggccctgctgtccctgctgttctccgagacctcctggcactacttcctgcacatctccctgggcctgggctccacccacctgacccgggaccgggtgcggaagtccatgtccgtggagcggaccttctccgagatcaacaaggccgaggagcagtactccctgtgccaggagctgtgctccgagctggcccaggacctgcagaaggagcggctgaagggccggaccgtgaccatcaagctgaagaacgtgaacttcgaggtgaagacccgggcctccaccgtgtcctccgtggtgtccaccgccgaggagatcttcgccatcgccaaggagctgctgaagaccgagatcgacgccgacttcccccaccccctgcggctgcggctgatgggcgtgcggatctcctccttccccaacgaggaggaccggaagcaccagcagggcggcggctccggcaagcggaccgccgacggctccggcggcggctcccccaagaagaagcggaaggtgtagctagcaccagcctcaagaacacccgaatggagtctctaagctacataataccaacttacactttacaaaatgttgtcccccaaaatgtagccattcgtatctgctcctaataaaaagaaagtttcttcacattctctcgagaaaaaaaaaaaatggaaaaaaaaaaaacggaaaaaaaaaaaaggtaaaaaaaaaaaatataaaaaaaaaaaacataaaaaaaaaaaacgaaaaaaaaaaaacgtaaaaaaaaaaaactcaaaaaaaaaaaagataaaaaaaaaaaacctaaaaaaaaaaaatgtaaaaaaaaaaaagggaaaaaaaaaaaacgcaaaaaaaaaaaacacaaaaaaaaaaaatgcaaaaaaaaaaaatcgaaaaaaaaaaaatctaaaaaaaaaaaacgaaaaaaaaaaaacccaaaaaaaaaaaagacaaaaaaaaaaaatagaaaaaaaaaaagttaaaaaaaaaaaactgaaaaaaaaaaaatttaaaaaaaaaaaatctag

SEQ ID NO: 2623 - DNA, 6524 bp, synthetic construct; identical to SEQ ID NO: 2538
  misc_feature 1..6524: note = Synthetic
  source 1..6524: mol_type = other DNA

SEQ ID NO: 2624 - DNA, 6574 bp, synthetic construct; identical to SEQ ID NO: 2539
  misc_feature 1..6574: note = Synthetic
  source 1..6574: mol_type = other DNA

SEQ ID NO: 2625 - DNA, 6512 bp, synthetic construct; identical to SEQ ID NO: 2540
  misc_feature 1..6512: note = Synthetic
  source 1..6512: mol_type = other DNA

SEQ ID NO: 2626 - DNA, 6512 bp, synthetic construct; identical to SEQ ID NO: 1921
  misc_feature 1..6512: note = Synthetic
  source 1..6512: mol_type = other DNA

SEQ ID NO: 2627 - DNA, 6512 bp, synthetic construct; identical to SEQ ID NO: 1924
  misc_feature 1..6512: note = Synthetic
  source 1..6512: mol_type = other DNA

SEQ ID NO: 2628 - DNA, 6512 bp, synthetic construct; identical to SEQ ID NO: 1927
  misc_feature 1..6512: note = Synthetic
  source 1..6512: mol_type = other DNA

SEQ ID NO: 2629 - DNA, 6509 bp, synthetic construct; identical to SEQ ID NO: 2544
  misc_feature 1..6509: note = Synthetic
  source 1..6509: mol_type = other DNA

SEQ ID NO: 2630 - DNA, 6554 bp, synthetic construct; identical to SEQ ID NO: 2545
  misc_feature 1..6554: note = Synthetic
  source 1..6554: mol_type = other DNA

SEQ ID NO: 2631 - DNA, 6469 bp, synthetic construct
  misc_feature 1..6469: note = Synthetic
  source 1..6469: mol_type = other DNA
aggaagctcagaataaacgctcaactttggccggatctgccaccatgaagcggaccgccgacggctccgagttcgagtcccccaagaagaagcggaaggtggacaagaagtactccatcggcctggacatcggcaccaactccgtgggctgggccgtgatcaccgacgagtacaaggtgccctccaagaagttcaaggtgctgggcaacaccgaccggcactccatcaagaagaacctgatcggcgccctgctgttcgactccggcgagaccgccgaggccacccggctgaagcggaccgcccggcggcggtacacccggcggaagaaccggatctgctacctgcaggagatcttctccaacgagatggccaaggtggacgactccttcttccaccggctggaggagtccttcctggtggaggaggacaagaagcacgagcggcaccccatcttcggcaacatcgtggacgaggtggcctaccacgagaagtaccccaccatctaccacctgcggaagaagctggtggactccaccgacaaggccgacctgcggctgatctacctggccctggcccacatgatcaagttccggggccacttcctgatcgagggcgacctgaaccccgacaactccgacgtggacaagctgttcatccagctggtgcagacctacaaccagctgttcgaggagaaccccatcaacgcctccggcgtggacgccaaggccatcctgtccgcccggctgtccaagtcccggcggctggagaacctgatcgcccagctgcccggcgagaagaagaacggcctgttcggcaacctgatcgccctgtccctgggcctgacccccaacttcaagtccaacttcgacctggccgaggacgccaagctgcagctgtccaaggacacctacgacgacgacctggacaacctgctggcccagatcggcgaccagtacgccgacctgttcctggccgccaagaacctgtccgacgccatcctgctgtccgacatcctgcgggtgaacaccgagatcaccaaggcccccctgtccgcctccatgatcaagcggtacgacgagcaccaccaggacctgaccctgctgaaggccctggtgcggcagcagctgcccgagaagtacaaggagatcttcttcgaccagtccaagaacggctacgccggctacatcgacggcggcgcctcccaggaggagttctacaagttcatcaagcccatcctggagaagatggacggcaccgaggagctgctggtgaagctgaaccgggaggacctgctgcggaagcagcggaccttcgacaacggctccatcccccaccagatccacctgggcgagctgcacgccatcctgcggcggcaggaggacttctaccccttcctgaaggacaaccgggagaagatcgagaagatcctgaccttccggatcccctactacgtgggccccctggcccggggcaactcccggttcgcctggatgacccggaagtccgaggagaccatcaccccctggaacttcgaggaggtggtggacaagggcgcctccgcccagtccttcatcgagcggatgaccaacttcgacaagaacctgcccaacgagaaggtgctgcccaagcactccctgctgtacgagtacttcaccgtgtacaacgagctgaccaaggtgaagtacgtgaccgagggcatgcggaagcccgccttcctgtccggcgagcagaagaaggccatcgtggacctgctgttcaagaccaaccggaaggtgaccgtgaagcagctgaaggaggactacttcaagaagatcgagtgcttcgactccgtggagatctccggcgtggaggaccggttcaacgcctccctgggcacctaccacgacctgctgaagatcatcaaggacaaggacttcctggacaacgaggagaacgaggacatcctggaggacatcgtgctgaccctgaccctgttcgaggaccgggagatgatcgaggagcggctgaagacctacgcccacctgttcgacgacaaggtgatgaagcagctgaagcggcggcggtacaccggctggggccggctgtcccggaagctgatcaacggcatccgggacaagcagtccggcaagaccatcctggacttcctgaagtccgacggcttcgccaaccggaacttcatgcagctgatccacgacgactccctgaccttcaaggaggacatccagaaggcccaggtgtccggccagggcgactccctgcacgagcacatcgccaacctggccggctcccccgccatcaagaagggcatcctgcagaccgtgaaggtggtggacgagctggtgaaggtgatgggccggcacaagcccgagaacatcgtgatcgagatggcccgggagaaccagaccacccagaagggccagaagaactcccgggagcggatgaagcggatcgaggagggcatcaaggagctgggctcccagatcctgaaggagcaccccgtggagaacacccagctgcagaacgagaagctgtacctgtactacctgcagaacggccgggacatgtacgtggaccaggagctggacatcaaccggctgtccgactacgacgtggacgccatcgtgccccagtccttcctgaaggacgactccatcgacaacaaggtgctgacccggtccgacaagaaccggggcaagtccgacaacgtgccctccgaggaggtggtgaagaagatgaagaactactggcggcagctgctgaacgccaagctgatcacccagcggaagttcgacaacctgaccaaggccgagcggggcggcctgtccgagctggacaaggccggcttcatcaagcggcagctggtggagacccggcagatcaccaagcacgtggcccagatcctggactcccggatgaacaccaagtacgacgagaacgacaagctgatccgggaggtgaaggtgatcaccctgaagtccaagctggtgtccgacttccggaaggacttccagttctacaaggtgcgggagatcaacaactaccaccacgcccacgacgcctacctgaacgccgtggtgggcaccgccctgatcaagaagtaccccaagctggagtccgagttcgtgtacggcgactacaaggtgtacgacgtgcggaagatgatcgccaagtccgagcaggagatcggcaaggccaccgccaagtacttcttctactccaacatcatgaacttcttcaagaccgagatcaccctggccaacggcgagatccggaagcggcccctgatcgagaccaacggcgagaccggcgagatcgtgtgggacaagggccgggacttcgccaccgtgcggaaggtgctgtccatgccccaggtgaacatcgtgaagaagaccgaggtgcagaccggcggcttctccaaggagtccatcctgcccaagcggaactccgacaagctgatcgcccggaagaaggactgggaccccaagaagtacggcggcttcgactcccccaccgtggcctactccgtgctggtggtggccaaggtggagaagggcaagtccaagaagctgaagtccgtgaaggagctgctgggcatcaccatcatggagcggtcctccttcgagaagaaccccatcgacttcctggaggccaagggctacaaggaggtgaagaaggacctgatcatcaagctgcccaagtactccctgttcgagctggagaacggccggaagcggatgctggcctccgccggcgagctgcagaagggcaacgagctggccctgccctccaagtacgtgaacttcctgtacctggcctcccactacgagaagctgaagggctcccccgaggacaacgagcagaagcagctgttcgtggagcagcacaagcactacctggacgagatcatcgagcagatctccgagttctccaagcgggtgatcctggccgacgccaacctggacaaggtgctgtccgcctacaacaagcaccgggacaagcccatccgggagcaggccgagaacatcatccacctgttcaccctgaccaacctgggcgcccccgccgccttcaagtacttcgacaccaccatcgaccggaagcggtacacctccaccaaggaggtgctggacgccaccctgatccaccagtccatcaccggcctgtacgagacccggatcgacctgtcccagctgggcggcgactccggcggctcctccggcggctccaagcggaccgccgacggctccgagttcgagtcccccaagaagaagcggaaggtgtccggcggctcctccggcggctccatggactccaccaaggagaagtgcgactcctacaaggacgacctgctgctgcggatgggcctgaacgacaacaaggccggcatggagggcctggacaaggagaagatcaacaagatcatcatggaggccaccaagggctcccggttctacggcaacgagctgaagaaggagaagcaggtgaaccagcggatcgagaacatgatgcagcagaaggcccagatcacctcccagcagctgcggaaggcccagctgcaggtggaccggttcgccatggagctggagcagtcccggaacctgtccaacaccatcgtgcacatcgacatggacgccttctacgccgccgtggagatgcgggacaaccccgagctgaaggacaagcccatcgccgtgggctccatgtccatgctgtccacctccaactaccacgcccggcggttcggcgtgcgggccgccatgcccggcttcatcgccaagcggctgtgcccccagctgatcatcgtgccccccaacttcgacaagtaccgggccgtgtccaaggaggtgaaggagatcctggccgactacgaccccaacttcatggccatgtccctggacgaggcctacctgaacatcaccaagcacctggaggagcggcagaactggcccgaggacaagcggcggtacttcatcaagatgggctcctccgtggagaacgacaaccccggcaaggaggtgaacaagctgtccgagcacgagcggtccatctcccccctgctgttcgaggagtccccctccgacgtgcagccccccggcgaccccttccaggtgaacttcgaggagcagaacaacccccagatcctgcagaactccgtggtgttcggcacctccgcccaggaggtggtgaaggagatccggttccggatcgagcagaagaccaccctgaccgcctccgccggcatcgcccccaacaccatgctggccaaggtgtgctccgacaagaacaagcccaacggccagtaccagatcctgcccaaccggcaggccgtgatggacttcatcaaggacctgcccatccggaaggtgtccggcatcggcaaggtgaccgagaagatgctgaaggccctgggcatcatcacctgcaccgagctgtaccagcagcgggccctgctgtccctgctgttctccgagacctcctggcactacttcctgcacatctccctgggcctgggctccacccacctgacccgggaccgggtgcggaagtccatgtccgtggagcggaccttctccgagatcaacaaggccgaggagcagtactccctgtgccaggagctgtgctccgagctggcccaggacctgcagaaggagcggctgaagggccggaccgtgaccatcaagctgaagaacgtgaacttcgaggtgaagacccgggcctccaccgtgtcctccgtggtgtccaccgccgaggagatcttcgccatcgccaaggagctgctgaagaccgagatcgacgccgacttcccccaccccctgcggctgcggctgatgggcgtgcggatctcctccttccccaacgaggaggaccggaagcaccagcagggcggcggctccggcaagcggaccgccgacggctccggcggcggctcccccaagaagaagcggaaggtgtagctagcaccagcctcaagaacacccgaatggagtctctaagctacataataccaacttacactttacaaaatgttgtcccccaaaatgtagccattcgtatctgctcctaataaaaagaaagtttcttcacattctctcgagaaaaaaaaaaaatggaaaaaaaaaaaacggaaaaaaaaaaaaggtaaaaaaaaaaaatataaaaaaaaaaaacataaaaaaaaaaaacgaaaaaaaaaaaacgtaaaaaaaaaaaactcaaaaaaaaaaaagataaaaaaaaaaaacctaaaaaaaaaaaatgtaaaaaaaaaaaagggaaaaaaaaaaaacgcaaaaaaaaaaaacacaaaaaaaaaaaatgcaaaaaaaaaaaatcgaaaaaaaaaaaatctaaaaaaaaaaaacgaaaaaaaaaaaacccaaaaaaaaaaaagacaaaaaaaaaaaatagaaaaaaaaaaagttaaaaaaaaaaaactgaaaaaaaaaaaatttaaaaaaaaaaaatctag

SEQ ID NO: 2632 - DNA, 6200 bp, synthetic construct
  misc_feature 1..6200: note = Synthetic
  source 1..6200: mol_type = other DNA
aggaagctcagaataaacgctcaactttggccggatctgccaccatgaagcggaccgccgacggctccgagttcgagtcccccaagaagaagcggaaggtggacaagaagtactccatcggcctggacatcggcaccaactccgtgggctgggccgtgatcaccgacgagtacaaggtgccctccaagaagttcaaggtgctgggcaacaccgaccggcactccatcaagaagaacctgatcggcgccctgctgttcgactccggcgagaccgccgaggccacccggctgaagcggaccgcccggcggcggtacacccggcggaagaaccggatctgctacctgcaggagatcttctccaacgagatggccaaggtggacgactccttcttccaccggctggaggagtccttcctggtggaggaggacaagaagcacgagcggcaccccatcttcggcaacatcgtggacgaggtggcctaccacgagaagtaccccaccatctaccacctgcggaagaagctggtggactccaccgacaaggccgacctgcggctgatctacctggccctggcccacatgatcaagttccggggccacttcctgatcgagggcgacctgaaccccgacaactccgacgtggacaagctgttcatccagctggtgcagacctacaaccagctgttcgaggagaaccccatcaacgcctccggcgtggacgccaaggccatcctgtccgcccggctgtccaagtcccggcggctggagaacctgatcgcccagctgcccggcgagaagaagaacggcctgttcggcaacctgatcgccctgtccctgggcctgacccccaacttcaagtccaacttcgacctggccgaggacgccaagctgcagctgtccaaggacacctacgacgacgacctggacaacctgctggcccagatcggcgaccagtacgccgacctgttcctggccgccaagaacctgtccgacgccatcctgctgtccgacatcctgcgggtgaacaccgagatcaccaaggcccccctgtccgcctccatgatcaagcggtacgacgagcaccaccaggacctgaccctgctgaaggccctggtgcggcagcagctgcccgagaagtacaaggagatcttcttcgaccagtccaagaacggctacgccggctacatcgacggcggcgcctcccaggaggagttctacaagttcatcaagcccatcctggagaagatggacggcaccgaggagctgctggtgaagctgaaccgggaggacctgctgcggaagcagcggaccttcgacaacggctccatcccccaccagatccacctgggcgagctgcacgccatcctgcggcggcaggaggacttctaccccttcctgaaggacaaccgggagaagatcgagaagatcctgaccttccggatcccctactacgtgggccccctggcccggggcaactcccggttcgcctggatgacccggaagtccgaggagaccatcaccccctggaacttcgaggaggtggtggacaagggcgcctccgcccagtccttcatcgagcggatgaccaacttcgacaagaacctgcccaacgagaaggtgctgcccaagcactccctgctgtacgagtacttcaccgtgtacaacgagctgaccaaggtgaagtacgtgaccgagggcatgcggaagcccgccttcctgtccggcgagcagaagaaggccatcgtggacctgctgttcaagaccaaccggaaggtgaccgtgaagcagctgaaggaggactacttcaagaagatcgagtgcttcgactccgtggagatctccggcgtggaggaccggttcaacgcctccctgggcacctaccacgacctgctgaagatcatcaaggacaaggacttcctggacaacgaggagaacgaggacatcctggaggacatcgtgctgaccctgaccctgttcgaggaccgggagatgatcgaggagcggctgaagacctacgcccacctgttcgacgacaaggtgatgaagcagctgaagcggcggcggtacaccggctggggccggctgtcccggaagctgatcaacggcatccgggacaagcagtccggcaagaccatcctggacttcctgaagtccgacggcttcgccaaccggaacttcatgcagctgatccacgacgactccctgaccttcaaggaggacatccagaaggcccaggtgtccggccagggcgactccctgcacgagcacatcgccaacctggccggctcccccgccatcaagaagggcatcctgcagaccgtgaaggtggtggacgagctggtgaaggtgatgggccggcacaagcccgagaacatcgtgatcgagatggcccgggagaaccagaccacccagaagggccagaagaactcccgggagcggatgaagcggatcgaggagggcatcaaggagctgggctcccagatcctgaaggagcaccccgtggagaacacccagctgcagaacgagaagctgtacctgtactacctgcagaacggccgggacatgtacgtggaccaggagctggacatcaaccggctgtccgactacgacgtggacgccatcgtgccccagtccttcctgaaggacgactccatcgacaacaaggtgctgacccggtccgacaagaaccggggcaagtccgacaacgtgccctccgaggaggtggtgaagaagatgaagaactactggcggcagctgctgaacgccaagctgatcacccagcggaagttcgacaacctgaccaaggccgagcggggcggcctgtccgagctggacaaggccggcttcatcaagcggcagctggtggagacccggcagatcaccaagcacgtggcccagatcctggactcccggatgaacaccaagtacgacgagaacgacaagctgatccgggaggtgaaggtgatcaccctgaagtccaagctggtgtccgacttccggaaggacttccagttctacaaggtgcgggagatcaacaactaccaccacgcccacgacgcctacctgaacgccgtggtgggcaccgccctgatcaagaagtaccccaagctggagtccgagttcgtgtacggcgactacaaggtgtacgacgtgcggaagatgatcgccaagtccgagcaggagatcggcaaggccaccgccaagtacttcttctactccaacatcatgaacttcttcaagaccgagatcaccctggccaacggcgagatccggaagcggcccctgatcgagaccaacggcgagaccggcgagatcgtgtgggacaagggccgggacttcgccaccgtgcggaaggtgctgtccatgccccaggtgaacatcgtgaagaagaccgaggtgcagaccggcggcttctccaaggagtccatcctgcccaagcggaactccgacaagctgatcgcccggaagaaggactgggaccccaagaagtacggcggcttcgactcccccaccgtggcctactccgtgctggtggtggccaaggtggagaagggcaagtccaagaagctgaagtccgtgaaggagctgctgggcatcaccatcatggagcggtcctccttcgagaagaaccccatcgacttcctggaggccaagggctacaaggaggtgaagaaggacctgatcatcaagctgcccaagtactccctgttcgagctggagaacggccggaagcggatgctggcctccgccggcgagctgcagaagggcaacgagctggccctgccctccaagtacgtgaacttcctgtacctggcctcccactacgagaagctgaagggctcccccgaggacaacgagcagaagcagctgttcgtggagcagcacaagcactacctggacgagatcatcgagcagatctccgagttctccaagcgggtgatcctggccgacgccaacctggacaaggtgctgtccgcctacaacaagcaccgggacaagcccatccgggagcaggccgagaacatcatccacctgttcaccctgaccaacctgggcgcccccgccgccttcaagtacttcgacaccaccatcgaccggaagcggtacacctccaccaaggaggtgctggacgccaccctgatccaccagtccatcaccggcctgtacgagacccggatcgacctgtcccagctgggcggcgactccggcggctcctccggcggctccaagcggaccgccgacggctccgagttcgagtcccccaagaagaagcggaaggtgtccggcggctcctccggcggctccatggactccaccaaggagaagtgcgactcctacaaggacgacctgctgctgcggatgggcctgaacgacaacaaggccggcatggagggcctggacaaggagaagatcaacaagatcatcatggaggccaccaagggctcccggttctacggcaacgagctgaagaaggagaagcaggtgaaccagcggatcgagaacatgatgcagcagaaggcccagatcacctcccagcagctgcggaaggcccagctgcaggtggaccggttcgccatggagctggagcagtcccggaacctgtccaacaccatcgtgcacatcgacatggacgccttctacgccgccgtggagatgcgggacaaccccgagctgaaggacaagcccatcgccgtgggctccatgtccatgctgtccacctccaactaccacgcccggcggttcggcgtgcgggccgccatgcccggcttcatcgccaagcggctgtgcccccagctgatcatcgtgccccccaacttcgacaagtaccgggccgtgtccaaggaggtgaaggagatcctggccgactacgaccccaacttcatggccatgtccctggacgaggcctacctgaacatcaccaagcacctggaggagcggcagaactggcccgaggacaagcggcggtacttcatcaagatgggctcctccgtggagaacgacaaccccggcaaggaggtgaacaagctgtccgagcacgagcggtccatctcccccctgctgttcgaggagtccccctccgacgtgcagccccccggcgaccccttccaggtgaacttcgaggagcagaacaacccccagatcctgcagaactccgtggtgttcggcacctccgcccaggaggtggtgaaggagatccggttccggatcgagcagaagaccaccctgaccgcctccgccggcatcgcccccaacaccatgctggccaaggtgtgctccgacaagaacaagcccaacggccagtaccagatcctgcccaaccggcaggccgtgatggacttcatcaaggacctgcccatccggaaggtgtccggcatcggcaaggtgaccgagaagatgctgaaggccctgggcatcatcacctgcaccgagctgtaccagcagcgggccctgctgtccctgctgttctccgagacctcctggcactacttcctgcacatctccctgggcctgggctccacccacctgacccgggaccgggtgcggaagtccatgtccgtggagcggaccttctccgagatcaacaaggccgaggagcagtactccctgtgccaggagctgtgctccgagctggcccaggacctgcagaaggagcggctgaagggccggaccgtgaccatcaagctgaagaacgtgaacttcgaggtgaagacccgggcctccaccgtgtcctccgtggtgtccaccgccgaggagatcttcgccatcgccaaggagctgctgaagaccgagatcgacgccgacttcccccaccccctgcggctgcggctgatgggcgtgcggatctcctccttccccaacgaggaggaccggaagcaccagcagggcggcggctccggcaagcggaccgccgacggctccggcggcggctcccccaagaagaagcggaaggtgtagctagcaccagcctcaagaacacccgaatggagtctctaagctacataataccaacttacactttacaaaatgttgtcccccaaaatgtagccattcgtatctgctcctaataaaaagaaagtttcttcacattctctcgagaaaaaaaaaaaaaaaaaaaaaaaaaaaaaaaaaaaaaaaaaaaaaaaaaaaaaaaaaaaaaaaaaaaaaaaaaaaaaaaaaaaaaaaaaaaaaaaaaaaatctag

SEQ ID NO: 2633 - DNA, 6509 bp, synthetic construct
  misc_feature 1..6509: note = Synthetic
  source 1..6509: mol_type = other DNA
aggactcactatttgttttcgcgcccagttgcaaaaagtgtcgaagctcagaataaacgctcaactttggccggatctgccaccatgaagcggaccgccgacggctccgagttcgagtcccccaagaagaagcggaaggtggacaagaagtactccatcggcctggacatcggcaccaactccgtgggctgggccgtgatcaccgacgagtacaaggtgccctccaagaagttcaaggtgctgggcaacaccgaccggcactccatcaagaagaacctgatcggcgccctgctgttcgactccggcgagaccgccgaggccacccggctgaagcggaccgcccggcggcggtacacccggcggaagaaccggatctgctacctgcaggagatcttctccaacgagatggccaaggtggacgactccttcttccaccggctggaggagtccttcctggtggaggaggacaagaagcacgagcggcaccccatcttcggcaacatcgtggacgaggtggcctaccacgagaagtaccccaccatctaccacctgcggaagaagctggtggactccaccgacaaggccgacctgcggctgatctacctggccctggcccacatgatcaagttccggggccacttcctgatcgagggcgacctgaaccccgacaactccgacgtggacaagctgttcatccagctggtgcagacctacaaccagctgttcgaggagaaccccatcaacgcctccggcgtggacgccaaggccatcctgtccgcccggctgtccaagtcccggcggctggagaacctgatcgcccagctgcccggcgagaagaagaacggcctgttcggcaacctgatcgccctgtccctgggcctgacccccaacttcaagtccaacttcgacctggccgaggacgccaagctgcagctgtccaaggacacctacgacgacgacctggacaacctgctggcccagatcggcgaccagtacgccgacctgttcctggccgccaagaacctgtccgacgccatcctgctgtccgacatcctgcgggtgaacaccgagatcaccaaggcccccctgtccgcctccatgatcaagcggtacgacgagcaccaccaggacctgaccctgctgaaggccctggtgcggcagcagctgcccgagaagtacaaggagatcttcttcgaccagtccaagaacggctacgccggctacatcgacggcggcgcctcccaggaggagttctacaagttcatcaagcccatcctggagaagatggacggcaccgaggagctgctggtgaagctgaaccgggaggacctgctgcggaagcagcggaccttcgacaacggctccatcccccaccagatccacctgggcgagctgcacgccatcctgcggcggcaggaggacttctaccccttcctgaaggacaaccgggagaagatcgagaagatcctgaccttccggatcccctactacgtgggccccctggcccggggcaactcccggttcgcctggatgacccggaagtccgaggagaccatcaccccctggaacttcgaggaggtggtggacaagggcgcctccgcccagtccttcatcgagcggatgaccaacttcgacaagaacctgcccaacgagaaggtgctgcccaagcactccctgctgtacgagtacttcaccgtgtacaacgagctgaccaaggtgaagtacgtgaccgagggcatgcggaagcccgccttcctgtccggcgagcagaagaaggccatcgtggacctgctgttcaagaccaaccggaaggtgaccgtgaagcagctgaaggaggactacttcaagaagatcgagtgcttcgactccgtggagatctccggcgtggaggaccggttcaacgcctccctgggcacctaccacgacctgctgaagatcatcaaggacaaggacttcctggacaacgaggagaacgaggacatcctggaggacatcgtgctgaccctgaccctgttcgaggaccgggagatgatcgaggagcggctgaagacctacgcccacctgttcgacgacaaggtgatgaagcagctgaagcggcggcggtacaccggctggggccggctgtcccggaagctgatcaacggcatccgggacaagcagtccggcaagaccatcctggacttcctgaagtccgacggcttcgccaaccggaacttcatgcagctgatccacgacgactccctgaccttcaaggaggacatccagaaggcccaggtgtccggccagggcgactccctgcacgagcacatcgccaacctggccggctcccccgccatcaagaagggcatcctgcagaccgtgaaggtggtggacgagctggtgaaggtgatgggccggcacaagcccgagaacatcgtgatcgagatggcccgggagaaccagaccacccagaagggccagaagaactcccgggagcggatgaagcggatcgaggagggcatcaaggagctgggctcccagatcctgaaggagcaccccgtggagaacacccagctgcagaacgagaagctgtacctgtactacctgcagaacggccgggacatgtacgtggaccaggagctggacatcaaccggctgtccgactacgacgtggacgccatcgtgccccagtccttcctgaaggacgactccatcgacaacaaggtgctgacccggtccgacaagaaccggggcaagtccgacaacgtgccctccgaggaggtggtgaagaagatgaagaactactggcggcagctgctgaacgccaagctgatcacccagcggaagttcgacaacctgaccaaggccgagcggggcggcctgtccgagctggacaaggccggcttcatcaagcggcagctggtggagacccggcagatcaccaagcacgtggcccagatcctggactcccggatgaacaccaagtacgacgagaacgacaagctgatccgggaggtgaaggtgatcaccctgaagtccaagctggtgtccgacttccggaaggacttccagttctacaaggtgcgggagatcaacaactaccaccacgcccacgacgcctacctgaacgccgtggtgggcaccgccctgatcaagaagtaccccaagctggagtccgagttcgtgtacggcgactacaaggtgtacgacgtgcggaagatgatcgccaagtccgagcaggagatcggcaaggccaccgccaagtacttcttctactccaacatcatgaacttcttcaagaccgagatcaccctggccaacggcgagatccggaagcggcccctgatcgagaccaacggcgagaccggcgagatcgtgtgggacaagggccgggacttcgccaccgtgcggaaggtgctgtccatgccccaggtgaacatcgtgaagaagaccgaggtgcagaccggcggcttctccaaggagtccatcctgcccaagcggaactccgacaagctgatcgcccggaagaaggactgggaccccaagaagtacggcggcttcgactcccccaccgtggcctactccgtgctggtggtggccaaggtggagaagggcaagtccaagaagctgaagtccgtgaaggagctgctgggcatcaccatcatggagcggtcctccttcgagaagaaccccatcgacttcctggaggccaagggctacaaggaggtgaagaaggacctgatcatcaagctgcccaagtactccctgttcgagctggagaacggccggaagcggatgctggcctccgccggcgagctgcagaagggcaacgagctggccctgccctccaagtacgtgaacttcctgtacctggcctcccactacgagaagctgaagggctcccccgaggacaacgagcagaagcagctgttcgtggagcagcacaagcactacctggacgagatcatcgagcagatctccgagttctccaagcgggtgatcctggccgacgccaacctggacaaggtgctgtccgcctacaacaagcaccgggacaagcccatccgggagcaggccgagaacatcatccacctgttcaccctgaccaacctgggcgcccccgccgccttcaagtacttcgacaccaccatcgaccggaagcggtacacctccaccaaggaggtgctggacgccaccctgatccaccagtccatcaccggcctgtacgagacccggatcgacctgtcccagctgggcggcgactccggcggctcctccggcggctccaagcggaccgccgacggctccgagttcgagtcccccaagaagaagcggaaggtgtccggcggctcctccggcggctccatggactccaccaaggagaagtgcgactcctacaaggacgacctgctgctgcggatgggcctgaacgacaacaaggccggcatggagggcctggacaaggagaagatcaacaagatcatcatggaggccaccaagggctcccggttctacggcaacgagctgaagaaggagaagcaggtgaaccagcggatcgagaacatgatgcagcagaaggcccagatcacctcccagcagctgcggaaggcccagctgcaggtggaccggttcgccatggagctggagcagtcccggaacctgtccaacaccatcgtgcacatcgacatggacgccttctacgccgccgtggagatgcgggacaaccccgagctgaaggacaagcccatcgccgtgggctccatgtccatgctgtccacctccaactaccacgcccggcggttcggcgtgcgggccgccatgcccggcttcatcgccaagcggctgtgcccccagctgatcatcgtgccccccaacttcgacaagtaccgggccgtgtccaaggaggtgaaggagatcctggccgactacgaccccaacttcatggccatgtccctggacgaggcctacctgaacatcaccaagcacctggaggagcggcagaactggcccgaggacaagcggcggtacttcatcaagatgggctcctccgtggagaacgacaaccccggcaaggaggtgaacaagctgtccgagcacgagcggtccatctcccccctgctgttcgaggagtccccctccgacgtgcagccccccggcgaccccttccaggtgaacttcgaggagcagaacaacccccagatcctgcagaactccgtggtgttcggcacctccgcccaggaggtggtgaaggagatccggttccggatcgagcagaagaccaccctgaccgcctccgccggcatcgcccccaacaccatgctggccaaggtgtgctccgacaagaacaagcccaacggccagtaccagatcctgcccaaccggcaggccgtgatggacttcatcaaggacctgcccatccggaaggtgtccggcatcggcaaggtgaccgagaagatgctgaaggccctgggcatcatcacctgcaccgagctgtaccagcagcgggccctgctgtccctgctgttctccgagacctcctggcactacttcctgcacatctccctgggcctgggctccacccacctgacccgggaccgggtgcggaagtccatgtccgtggagcggaccttctccgagatcaacaaggccgaggagcagtactccctgtgccaggagctgtgctccgagctggcccaggacctgcagaaggagcggctgaagggccggaccgtgaccatcaagctgaagaacgtgaacttcgaggtgaagacccgggcctccaccgtgtcctccgtggtgtccaccgccgaggagatcttcgccatcgccaaggagctgctgaagaccgagatcgacgccgacttcccccaccccctgcggctgcggctgatgggcgtgcggatctcctccttccccaacgaggaggaccggaagcaccagcagggcggcggctccggcaagcggaccgccgacggctccggcggcggctcccccaagaagaagcggaaggtgtagctagcaccagcctcaagaacacccgaatggagtctctaagctacataataccaacttacactttacaaaatgttgtcccccaaaatgtagccattcgtatctgctcctaataaaaagaaagtttcttcacattctctcgagaaaaaaaaaaaatggaaaaaaaaaaaacggaaaaaaaaaaaaggtaaaaaaaaaaaatataaaaaaaaaaaacataaaaaaaaaaaacgaaaaaaaaaaaacgtaaaaaaaaaaaactcaaaaaaaaaaaagataaaaaaaaaaaacctaaaaaaaaaaaatgtaaaaaaaaaaaagggaaaaaaaaaaaacgcaaaaaaaaaaaacacaaaaaaaaaaaatgcaaaaaaaaaaaatcgaaaaaaaaaaaatctaaaaaaaaaaaacgaaaaaaaaaaaacccaaaaaaaaaaaagacaaaaaaaaaaaatagaaaaaaaaaaagttaaaaaaaaaaaactgaaaaaaaaaaaatttaaaaaaaaaaaatctag

SEQ ID NO: 2634 - DNA, 6563 bp, synthetic construct
  misc_feature 1..6563: note = Synthetic
  source 1..6563: mol_type = other DNA
aggaagctcagaataaacgctcaactttggccggatctgccaccatgaagcggaccgccgacggctccgagttcgagtcccccaagaagaagcggaaggtggacaagaagtactccatcggcctggacatcggcaccaactccgtgggctgggccgtgatcaccgacgagtacaaggtgccctccaagaagttcaaggtgctgggcaacaccgaccggcactccatcaagaagaacctgatcggcgccctgctgttcgactccggcgagaccgccgaggccacccggctgaagcggaccgcccggcggcggtacacccggcggaagaaccggatctgctacctgcaggagatcttctccaacgagatggccaaggtggacgactccttcttccaccggctggaggagtccttcctggtggaggaggacaagaagcacgagcggcaccccatcttcggcaacatcgtggacgaggtggcctaccacgagaagtaccccaccatctaccacctgcggaagaagctggtggactccaccgacaaggccgacctgcggctgatctacctggccctggcccacatgatcaagttccggggccacttcctgatcgagggcgacctgaaccccgacaactccgacgtggacaagctgttcatccagctggtgcagacctacaaccagctgttcgaggagaaccccatcaacgcctccggcgtggacgccaaggccatcctgtccgcccggctgtccaagtcccggcggctggagaacctgatcgcccagctgcccggcgagaagaagaacggcctgttcggcaacctgatcgccctgtccctgggcctgacccccaacttcaagtccaacttcgacctggccgaggacgccaagctgcagctgtccaaggacacctacgacgacgacctggacaacctgctggcccagatcggcgaccagtacgccgacctgttcctggccgccaagaacctgtccgacgccatcctgctgtccgacatcctgcgggtgaacaccgagatcaccaaggcccccctgtccgcctccatgatcaagcggtacgacgagcaccaccaggacctgaccctgctgaaggccctggtgcggcagcagctgcccgagaagtacaaggagatcttcttcgaccagtccaagaacggctacgccggctacatcgacggcggcgcctcccaggaggagttctacaagttcatcaagcccatcctggagaagatggacggcaccgaggagctgctggtgaagctgaaccgggaggacctgctgcggaagcagcggaccttcgacaacggctccatcccccaccagatccacctgggcgagctgcacgccatcctgcggcggcaggaggacttctaccccttcctgaaggacaaccgggagaagatcgagaagatcctgaccttccggatcccctactacgtgggccccctggcccggggcaactcccggttcgcctggatgacccggaagtccgaggagaccatcaccccctggaacttcgaggaggtggtggacaagggcgcctccgcccagtccttcatcgagcggatgaccaacttcgacaagaacctgcccaacgagaaggtgctgcccaagcactccctgctgtacgagtacttcaccgtgtacaacgagctgaccaaggtgaagtacgtgaccgagggcatgcggaagcccgccttcctgtccggcgagcagaagaaggccatcgtggacctgctgttcaagaccaaccggaaggtgaccgtgaagcagctgaaggaggactacttcaagaagatcgagtgcttcgactccgtggagatctccggcgtggaggaccggttcaacgcctccctgggcacctaccacgacctgctgaagatcatcaaggacaaggacttcctggacaacgaggagaacgaggacatcctggaggacatcgtgctgaccctgaccctgttcgaggaccgggagatgatcgaggagcggctgaagacctacgcccacctgttcgacgacaaggtgatgaagcagctgaagcggcggcggtacaccggctggggccggctgtcccggaagctgatcaacggcatccgggacaagcagtccggcaagaccatcctggacttcctgaagtccgacggcttcgccaaccggaacttcatgcagctgatccacgacgactccctgaccttcaaggaggacatccagaaggcccaggtgtccggccagggcgactccctgcacgagcacatcgccaacctggccggctcccccgccatcaagaagggcatcctgcagaccgtgaaggtggtggacgagctggtgaaggtgatgggccggcacaagcccgagaacatcgtgatcgagatggcccgggagaaccagaccacccagaagggccagaagaactcccgggagcggatgaagcggatcgaggagggcatcaaggagctgggctcccagatcctgaaggagcaccccgtggagaacacccagctgcagaacgagaagctgtacctgtactacctgcagaacggccgggacatgtacgtggaccaggagctggacatcaaccggctgtccgactacgacgtggacgccatcgtgccccagtccttcctgaaggacgactccatcgacaacaaggtgctgacccggtccgacaagaaccggggcaagtccgacaacgtgccctccgaggaggtggtgaagaagatgaagaactactggcggcagctgctgaacgccaagctgatcacccagcggaagttcgacaacctgaccaaggccgagcggggcggcctgtccgagctggacaaggccggcttcatcaagcggcagctggtggagacccggcagatcaccaagcacgtggcccagatcctggactcccggatgaacaccaagtacgacgagaacgacaagctgatccgggaggtgaaggtgatcaccctgaagtccaagctggtgtccgacttccggaaggacttccagttctacaaggtgcgggagatcaacaactaccaccacgcccacgacgcctacctgaacgccgtggtgggcaccgccctgatcaagaagtaccccaagctggagtccgagttcgtgtacggcgactacaaggtgtacgacgtgcggaagatgatcgccaagtccgagcaggagatcggcaaggccaccgccaagtacttcttctactccaacatcatgaacttcttcaagaccgagatcaccctggccaacggcgagatccggaagcggcccctgatcgagaccaacggcgagaccggcgagatcgtgtgggacaagggccgggacttcgccaccgtgcggaaggtgctgtccatgccccaggtgaacatcgtgaagaagaccgaggtgcagaccggcggcttctccaaggagtccatcctgcccaagcggaactccgacaagctgatcgcccggaagaaggactgggaccccaagaagtacggcggcttcgactcccccaccgtggcctactccgtgctggtggtggccaaggtggagaagggcaagtccaagaagctgaagtccgtgaaggagctgctgggcatcaccatcatggagcggtcctccttcgagaagaaccccatcgacttcctggaggccaagggctacaaggaggtgaagaaggacctgatcatcaagctgcccaagtactccctgttcgagctggagaacggccggaagcggatgctggcctccgccggcgagctgcagaagggcaacgagctggccctgccctccaagtacgtgaacttcctgtacctggcctcccactacgagaagctgaagggctcccccgaggacaacgagcagaagcagctgttcgtggagcagcacaagcactacctggacgagatcatcgagcagatctccgagttctccaagcgggtgatcctggccgacgccaacctggacaaggtgctgtccgcctacaacaagcaccgggacaagcccatccgggagcaggccgagaacatcatccacctgttcaccctgaccaacctgggcgcccccgccgccttcaagtacttcgacaccaccatcgaccggaagcggtacacctccaccaaggaggtgctggacgccaccctgatccaccagtccatcaccggcctgtacgagacccggatcgacctgtcccagctgggcggcgactccggcggctcctccggcggctccaagcggaccgccgacggctccgagttcgagtcccccaagaagaagcggaaggtgtccggcggctcctccggcggctccatggactccaccaaggagaagtgcgactcctacaaggacgacctgctgctgcggatgggcctgaacgacaacaaggccggcatggagggcctggacaaggagaagatcaacaagatcatcatggaggccaccaagggctcccggttctacggcaacgagctgaagaaggagaagcaggtgaaccagcggatcgagaacatgatgcagcagaaggcccagatcacctcccagcagctgcggaaggcccagctgcaggtggaccggttcgccatggagctggagcagtcccggaacctgtccaacaccatcgtgcacatcgacatggacgccttctacgccgccgtggagatgcgggacaaccccgagctgaaggacaagcccatcgccgtgggctccatgtccatgctgtccacctccaactaccacgcccggcggttcggcgtgcgggccgccatgcccggcttcatcgccaagcggctgtgcccccagctgatcatcgtgccccccaacttcgacaagtaccgggccgtgtccaaggaggtgaaggagatcctggccgactacgaccccaacttcatggccatgtccctggacgaggcctacctgaacatcaccaagcacctggaggagcggcagaactggcccgaggacaagcggcggtacttcatcaagatgggctcctccgtggagaacgacaaccccggcaaggaggtgaacaagctgtccgagcacgagcggtccatctcccccctgctgttcgaggagtccccctccgacgtgcagccccccggcgaccccttccaggtgaacttcgaggagcagaacaacccccagatcctgcagaactccgtggtgttcggcacctccgcccaggaggtggtgaaggagatccggttccggatcgagcagaagaccaccctgaccgcctccgccggcatcgcccccaacaccatgctggccaaggtgtgctccgacaagaacaagcccaacggccagtaccagatcctgcccaaccggcaggccgtgatggacttcatcaaggacctgcccatccggaaggtgtccggcatcggcaaggtgaccgagaagatgctgaaggccctgggcatcatcacctgcaccgagctgtaccagcagcgggccctgctgtccctgctgttctccgagacctcctggcactacttcctgcacatctccctgggcctgggctccacccacctgacccgggaccgggtgcggaagtccatgtccgtggagcggaccttctccgagatcaacaaggccgaggagcagtactccctgtgccaggagctgtgctccgagctggcccaggacctgcagaaggagcggctgaagggccggaccgtgaccatcaagctgaagaacgtgaacttcgaggtgaagacccgggcctccaccgtgtcctccgtggtgtccaccgccgaggagatcttcgccatcgccaaggagctgctgaagaccgagatcgacgccgacttcccccaccccctgcggctgcggctgatgggcgtgcggatctcctccttccccaacgaggaggaccggaagcaccagcagggcggcggctccggcaagcggaccgccgacggctccggcggcggctcccccaagaagaagcggaaggtgtagctagcaccagcctcaagaacacccgaatggagtctctaagctacataataccaacttacactttacaaaatgttgtcccccaaaatgtagccattcgtatctgctcctaataaaaagaaagtttcttcacattcttgtcagcccagaaccccacacgagttttgccactgctaagctgtgaggcagtgcaggctgggacagccgacctccaggttgcgaaaaacctggtctcgagaaaaaaaaaaaatggaaaaaaaaaaaacggaaaaaaaaaaaaggtaaaaaaaaaaaatataaaaaaaaaaaacataaaaaaaaaaaacgaaaaaaaaaaaacgtaaaaaaaaaaaactcaaaaaaaaaaaagataaaaaaaaaaaacctaaaaaaaaaaaatgtaaaaaaaaaaaagggaaaaaaaaaaaacgcaaaaaaaaaaaacacaaaaaaaaaaaatgcaaaaaaaaaaaatcgaaaaaaaaaaaatctaaaaaaaaaaaacgaaaaaaaaaaaacccaaaaaaaaaaaagacaaaaaaaaaaaatagaaaaaaaaaaagttaaaaaaaaaaaactgaaaaaaaaaaaatttaaaaaaaaaaaatctag

SEQ ID NO: 2635 - DNA, 6603 bp, synthetic construct
  misc_feature 1..6603: note = Synthetic
  source 1..6603: mol_type = other DNA
aggactcactatttgttttcgcgcccagttgcaaaaagtgtcgaagctcagaataaacgctcaactttggccggatctgccaccatgaagcggaccgccgacggctccgagttcgagtcccccaagaagaagcggaaggtggacaagaagtactccatcggcctggacatcggcaccaactccgtgggctgggccgtgatcaccgacgagtacaaggtgccctccaagaagttcaaggtgctgggcaacaccgaccggcactccatcaagaagaacctgatcggcgccctgctgttcgactccggcgagaccgccgaggccacccggctgaagcggaccgcccggcggcggtacacccggcggaagaaccggatctgctacctgcaggagatcttctccaacgagatggccaaggtggacgactccttcttccaccggctggaggagtccttcctggtggaggaggacaagaagcacgagcggcaccccatcttcggcaacatcgtggacgaggtggcctaccacgagaagtaccccaccatctaccacctgcggaagaagctggtggactccaccgacaaggccgacctgcggctgatctacctggccctggcccacatgatcaagttccggggccacttcctgatcgagggcgacctgaaccccgacaactccgacgtggacaagctgttcatccagctggtgcagacctacaaccagctgttcgaggagaaccccatcaacgcctccggcgtggacgccaaggccatcctgtccgcccggctgtccaagtcccggcggctggagaacctgatcgcccagctgcccggcgagaagaagaacggcctgttcggcaacctgatcgccctgtccctgggcctgacccccaacttcaagtccaacttcgacctggccgaggacgccaagctgcagctgtccaaggacacctacgacgacgacctggacaacctgctggcccagatcggcgaccagtacgccgacctgttcctggccgccaagaacctgtccgacgccatcctgctgtccgacatcctgcgggtgaacaccgagatcaccaaggcccccctgtccgcctccatgatcaagcggtacgacgagcaccaccaggacctgaccctgctgaaggccctggtgcggcagcagctgcccgagaagtacaaggagatcttcttcgaccagtccaagaacggctacgccggctacatcgacggcggcgcctcccaggaggagttctacaagttcatcaagcccatcctggagaagatggacggcaccgaggagctgctggtgaagctgaaccgggaggacctgctgcggaagcagcggaccttcgacaacggctccatcccccaccagatccacctgggcgagctgcacgccatcctgcggcggcaggaggacttctaccccttcctgaaggacaaccgggagaagatcgagaagatcctgaccttccggatcccctactacgtgggccccctggcccggggcaactcccggttcgcctggatgacccggaagtccgaggagaccatcaccccctggaacttcgaggaggtggtggacaagggcgcctccgcccagtccttcatcgagcggatgaccaacttcgacaagaacctgcccaacgagaaggtgctgcccaagcactccctgctgtacgagtacttcaccgtgtacaacgagctgaccaaggtgaagtacgtgaccgagggcatgcggaagcccgccttcctgtccggcgagcagaagaaggccatcgtggacctgctgttcaagaccaaccggaaggtgaccgtgaagcagctgaaggaggactacttcaagaagatcgagtgcttcgactccgtggagatctccggcgtggaggaccggttcaacgcctccctgggcacctaccacgacctgctgaagatcatcaaggacaaggacttcctggacaacgaggagaacgaggacatcctggaggacatcgtgctgaccctgaccctgttcgaggaccgggagatgatcgaggagcggctgaagacctacgcccacctgttcgacgacaaggtgatgaagcagctgaagcggcggcggtacaccggctggggccggctgtcccggaagctgatcaacggcatccgggacaagcagtccggcaagaccatcctggacttcctgaagtccgacggcttcgccaaccggaacttcatgcagctgatccacgacgactccctgaccttcaaggaggacatccagaaggcccaggtgtccggccagggcgactccctgcacgagcacatcgccaacctggccggctcccccgccatcaagaagggcatcctgcagaccgtgaaggtggtggacgagctggtgaaggtgatgggccggcacaagcccgagaacatcgtgatcgagatggcccgggagaaccagaccacccagaagggccagaagaactcccgggagcggatgaagcggatcgaggagggcatcaaggagctgggctcccagatcctgaaggagcaccccgtggagaacacccagctgcagaacgagaagctgtacctgtactacctgcagaacggccgggacatgtacgtggaccaggagctggacatcaaccggctgtccgactacgacgtggacgccatcgtgccccagtccttcctgaaggacgactccatcgacaacaaggtgctgacccggtccgacaagaaccggggcaagtccgacaacgtgccctccgaggaggtggtgaagaagatgaagaactactggcggcagctgctgaacgccaagctgatcacccagcggaagttcgacaacctgaccaaggccgagcggggcggcctgtccgagctggacaaggccggcttcatcaagcggcagctggtggagacccggcagatcaccaagcacgtggcccagatcctggactcccggatgaacaccaagtacgacgagaacgacaagctgatccgggaggtgaaggtgatcaccctgaagtccaagctggtgtccgacttccggaaggacttccagttctacaaggtgcgggagatcaacaactaccaccacgcccacgacgcctacctgaacgccgtggtgggcaccgccctgatcaagaagtaccccaagctggagtccgagttcgtgtacggcgactacaaggtgtacgacgtgcggaagatgatcgccaagtccgagcaggagatcggcaaggccaccgccaagtacttcttctactccaacatcatgaacttcttcaagaccgagatcaccctggccaacggcgagatccggaagcggcccctgatcgagaccaacggcgagaccggcgagatcgtgtgggacaagggccgggacttcgccaccgtgcggaaggtgctgtccatgccccaggtgaacatcgtgaagaagaccgaggtgcagaccggcggcttctccaaggagtccatcctgcccaagcggaactccgacaagctgatcgcccggaagaaggactgggaccccaagaagtacggcggcttcgactcccccaccgtggcctactccgtgctggtggtggccaaggtggagaagggcaagtccaagaagctgaagtccgtgaaggagctgctgggcatcaccatcatggagcggtcctccttcgagaagaaccccatcgacttcctggaggccaagggctacaaggaggtgaagaaggacctgatcatcaagctgcccaagtactccctgttcgagctggagaacggccggaagcggatgctggcctccgccggcgagctgcagaagggcaacgagctggccctgccctccaagtacgtgaacttcctgtacctggcctcccactacgagaagctgaagggctcccccgaggacaacgagcagaagcagctgttcgtggagcagcacaagcactacctggacgagatcatcgagcagatctccgagttctccaagcgggtgatcctggccgacgccaacctggacaaggtgctgtccgcctacaacaagcaccgggacaagcccatccgggagcaggccgagaacatcatccacctgttcaccctgaccaacctgggcgcccccgccgccttcaagtacttcgacaccaccatcgaccggaagcggtacacctccaccaaggaggtgctggacgccaccctgatccaccagtccatcaccggcctgtacgagacccggatcgacctgtcccagctgggcggcgactccggcggctcctccggcggctccaagcggaccgccgacggctccgagttcgagtcccccaagaagaagcggaaggtgtccggcggctcctccggcggctccatggactccaccaaggagaagtgcgactcctacaaggacgacctgctgctgcggatgggcctgaacgacaacaaggccggcatggagggcctggacaaggagaagatcaacaagatcatcatggaggccaccaagggctcccggttctacggcaacgagctgaagaaggagaagcaggtgaaccagcggatcgagaacatgatgcagcagaaggcccagatcacctcccagcagctgcggaaggcccagctgcaggtggaccggttcgccatggagctggagcagtcccggaacctgtccaacaccatcgtgcacatcgacatggacgccttctacgccgccgtggagatgcgggacaaccccgagctgaaggacaagcccatcgccgtgggctccatgtccatgctgtccacctccaactaccacgcccggcggttcggcgtgcgggccgccatgcccggcttcatcgccaagcggctgtgcccccagctgatcatcgtgccccccaacttcgacaagtaccgggccgtgtccaaggaggtgaaggagatcctggccgactacgaccccaacttcatggccatgtccctggacgaggcctacctgaacatcaccaagcacctggaggagcggcagaactggcccgaggacaagcggcggtacttcatcaagatgggctcctccgtggagaacgacaaccccggcaaggaggtgaacaagctgtccgagcacgagcggtccatctcccccctgctgttcgaggagtccccctccgacgtgcagccccccggcgaccccttccaggtgaacttcgaggagcagaacaacccccagatcctgcagaactccgtggtgttcggcacctccgcccaggaggtggtgaaggagatccggttccggatcgagcagaagaccaccctgaccgcctccgccggcatcgcccccaacaccatgctggccaaggtgtgctccgacaagaacaagcccaacggccagtaccagatcctgcccaaccggcaggccgtgatggacttcatcaaggacctgcccatccggaaggtgtccggcatcggcaaggtgaccgagaagatgctgaaggccctgggcatcatcacctgcaccgagctgtaccagcagcgggccctgctgtccctgctgttctccgagacctcctggcactacttcctgcacatctccctgggcctgggctccacccacctgacccgggaccgggtgcggaagtccatgtccgtggagcggaccttctccgagatcaacaaggccgaggagcagtactccctgtgccaggagctgtgctccgagctggcccaggacctgcagaaggagcggctgaagggccggaccgtgaccatcaagctgaagaacgtgaacttcgaggtgaagacccgggcctccaccgtgtcctccgtggtgtccaccgccgaggagatcttcgccatcgccaaggagctgctgaagaccgagatcgacgccgacttcccccaccccctgcggctgcggctgatgggcgtgcggatctcctccttccccaacgaggaggaccggaagcaccagcagggcggcggctccggcaagcggaccgccgacggctccggcggcggctcccccaagaagaagcggaaggtgtagctagcaccagcctcaagaacacccgaatggagtctctaagctacataataccaacttacactttacaaaatgttgtcccccaaaatgtagccattcgtatctgctcctaataaaaagaaagtttcttcacattcttgtcagcccagaaccccacacgagttttgccactgctaagctgtgaggcagtgcaggctgggacagccgacctccaggttgcgaaaaacctggtctcgagaaaaaaaaaaaatggaaaaaaaaaaaacggaaaaaaaaaaaaggtaaaaaaaaaaaatataaaaaaaaaaaacataaaaaaaaaaaacgaaaaaaaaaaaacgtaaaaaaaaaaaactcaaaaaaaaaaaagataaaaaaaaaaaacctaaaaaaaaaaaatgtaaaaaaaaaaaagggaaaaaaaaaaaacgcaaaaaaaaaaaacacaaaaaaaaaaaatgcaaaaaaaaaaaatcgaaaaaaaaaaaatctaaaaaaaaaaaacgaaaaaaaaaaaacccaaaaaaaaaaaagacaaaaaaaaaaaatagaaaaaaaaaaagttaaaaaaaaaaaactgaaaaaaaaaaaatttaaaaaaaaaaaatctag

SEQ ID NO: 2636 - DNA, 6508 bp, synthetic construct
  misc_feature 1..6508: note = Synthetic
  source 1..6508: mol_type = other DNA
aggtgttcaaccagagtgaaaccactaacgggtcagagccccaagctcagaataaacgctcaactttggccggatctgccaccatgaagcggaccgccgacggctccgagttcgagtcccccaagaagaagcggaaggtggacaagaagtactccatcggcctggacatcggcaccaactccgtgggctgggccgtgatcaccgacgagtacaaggtgccctccaagaagttcaaggtgctgggcaacaccgaccggcactccatcaagaagaacctgatcggcgccctgctgttcgactccggcgagaccgccgaggccacccggctgaagcggaccgcccggcggcggtacacccggcggaagaaccggatctgctacctgcaggagatcttctccaacgagatggccaaggtggacgactccttcttccaccggctggaggagtccttcctggtggaggaggacaagaagcacgagcggcaccccatcttcggcaacatcgtggacgaggtggcctaccacgagaagtaccccaccatctaccacctgcggaagaagctggtggactccaccgacaaggccgacctgcggctgatctacctggccctggcccacatgatcaagttccggggccacttcctgatcgagggcgacctgaaccccgacaactccgacgtggacaagctgttcatccagctggtgcagacctacaaccagctgttcgaggagaaccccatcaacgcctccggcgtggacgccaaggccatcctgtccgcccggctgtccaagtcccggcggctggagaacctgatcgcccagctgcccggcgagaagaagaacggcctgttcggcaacctgatcgccctgtccctgggcctgacccccaacttcaagtccaacttcgacctggccgaggacgccaagctgcagctgtccaaggacacctacgacgacgacctggacaacctgctggcccagatcggcgaccagtacgccgacctgttcctggccgccaagaacctgtccgacgccatcctgctgtccgacatcctgcgggtgaacaccgagatcaccaaggcccccctgtccgcctccatgatcaagcggtacgacgagcaccaccaggacctgaccctgctgaaggccctggtgcggcagcagctgcccgagaagtacaaggagatcttcttcgaccagtccaagaacggctacgccggctacatcgacggcggcgcctcccaggaggagttctacaagttcatcaagcccatcctggagaagatggacggcaccgaggagctgctggtgaagctgaaccgggaggacctgctgcggaagcagcggaccttcgacaacggctccatcccccaccagatccacctgggcgagctgcacgccatcctgcggcggcaggaggacttctaccccttcctgaaggacaaccgggagaagatcgagaagatcctgaccttccggatcccctactacgtgggccccctggcccggggcaactcccggttcgcctggatgacccggaagtccgaggagaccatcaccccctggaacttcgaggaggtggtggacaagggcgcctccgcccagtccttcatcgagcggatgaccaacttcgacaagaacctgcccaacgagaaggtgctgcccaagcactccctgctgtacgagtacttcaccgtgtacaacgagctgaccaaggtgaagtacgtgaccgagggcatgcggaagcccgccttcctgtccggcgagcagaagaaggccatcgtggacctgctgttcaagaccaaccggaaggtgaccgtgaagcagctgaaggaggactacttcaagaagatcgagtgcttcgactccgtggagatctccggcgtggaggaccggttcaacgcctccctgggcacctaccacgacctgctgaagatcatcaaggacaaggacttcctggacaacgaggagaacgaggacatcctggaggacatcgtgctgaccctgaccctgttcgaggaccgggagatgatcgaggagcggctgaagacctacgcccacctgttcgacgacaaggtgatgaagcagctgaagcggcggcggtacaccggctggggccggctgtcccggaagctgatcaacggcatccgggacaagcagtccggcaagaccatcctggacttcctgaagtccgacggcttcgccaaccggaacttcatgcagctgatccacgacgactccctgaccttcaaggaggacatccagaaggcccaggtgtccggccagggcgactccctgcacgagcacatcgccaacctggccggctcccccgccatcaagaagggcatcctgcagaccgtgaaggtggtggacgagctggtgaaggtgatgggccggcacaagcccgagaacatcgtgatcgagatggcccgggagaaccagaccacccagaagggccagaagaactcccgggagcggatgaagcggatcgaggagggcatcaaggagctgggctcccagatcctgaaggagcaccccgtggagaacacccagctgcagaacgagaagctgtacctgtactacctgcagaacggccgggacatgtacgtggaccaggagctggacatcaaccggctgtccgactacgacgtggacgccatcgtgccccagtccttcctgaaggacgactccatcgacaacaaggtgctgacccggtccgacaagaaccggggcaagtccgacaacgtgccctccgaggaggtggtgaagaagatgaagaactactggcggcagctgctgaacgccaagctgatcacccagcggaagttcgacaacctgaccaaggccgagcggggcggcctgtccgagctggacaaggccggcttcatcaagcggcagctggtggagacccggcagatcaccaagcacgtggcccagatcctggactcccggatgaacaccaagtacgacgagaacgacaagctgatccgggaggtgaaggtgatcaccctgaagtccaagctggtgtccgacttccggaaggacttccagttctacaaggtgcgggagatcaacaactaccaccacgcccacgacgcctacctgaacgccgtggtgggcaccgccctgatcaagaagtaccccaagctggagtccgagttcgtgtacggcgactacaaggtgtacgacgtgcggaagatgatcgccaagtccgagcaggagatcggcaaggccaccgccaagtacttcttctactccaacatcatgaacttcttcaagaccgagatcaccctggccaacggcgagatccggaagcggcccctgatcgagaccaacggcgagaccggcgagatcgtgtgggacaagggccgggacttcgccaccgtgcggaaggtgctgtccatgccccaggtgaacatcgtgaagaagaccgaggtgcagaccggcggcttctccaaggagtccatcctgcccaagcggaactccgacaagctgatcgcccggaagaaggactgggaccccaagaagtacggcggcttcgactcccccaccgtggcctactccgtgctggtggtggccaaggtggagaagggcaagtccaagaagctgaagtccgtgaaggagctgctgggcatcaccatcatggagcggtcctccttcgagaagaaccccatcgacttcctggaggccaagggctacaaggaggtgaagaaggacctgatcatcaagctgcccaagtactccctgttcgagctggagaacggccggaagcggatgctggcctccgccggcgagctgcagaagggcaacgagctggccctgccctccaagtacgtgaacttcctgtacctggcctcccactacgagaagctgaagggctcccccgaggacaacgagcagaagcagctgttcgtggagcagcacaagcactacctggacgagatcatcgagcagatctccgagttctccaagcgggtgatcctggccgacgccaacctggacaaggtgctgtccgcctacaacaagcaccgggacaagcccatccgggagcaggccgagaacatcatccacctgttcaccctgaccaacctgggcgcccccgccgccttcaagtacttcgacaccaccatcgaccggaagcggtacacctccaccaaggaggtgctggacgccaccctgatccaccagtccatcaccggcctgtacgagacccggatcgacctgtcccagctgggcggcgactccggcggctcctccggcggctccaagcggaccgccgacggctccgagttcgagtcccccaagaagaagcggaaggtgtccggcggctcctccggcggctccatggactccaccaaggagaagtgcgactcctacaaggacgacctgctgctgcggatgggcctgaacgacaacaaggccggcatggagggcctggacaaggagaagatcaacaagatcatcatggaggccaccaagggctcccggttctacggcaacgagctgaagaaggagaagcaggtgaaccagcggatcgagaacatgatgcagcagaaggcccagatcacctcccagcagctgcggaaggcccagctgcaggtggaccggttcgccatggagctggagcagtcccggaacctgtccaacaccatcgtgcacatcgacatggacgccttctacgccgccgtggagatgcgggacaaccccgagctgaaggacaagcccatcgccgtgggctccatgtccatgctgtccacctccaactaccacgcccggcggttcggcgtgcgggccgccatgcccggcttcatcgccaagcggctgtgcccccagctgatcatcgtgccccccaacttcgacaagtaccgggccgtgtccaaggaggtgaaggagatcctggccgactacgaccccaacttcatggccatgtccctggacgaggcctacctgaacatcaccaagcacctggaggagcggcagaactggcccgaggacaagcggcggtacttcatcaagatgggctcctccgtggagaacgacaaccccggcaaggaggtgaacaagctgtccgagcacgagcggtccatctcccccctgctgttcgaggagtccccctccgacgtgcagccccccggcgaccccttccaggtgaacttcgaggagcagaacaacccccagatcctgcagaactccgtggtgttcggcacctccgcccaggaggtggtgaaggagatccggttccggatcgagcagaagaccaccctgaccgcctccgccggcatcgcccccaacaccatgctggccaaggtgtgctccgacaagaacaagcccaacggccagtaccagatcctgcccaaccggcaggccgtgatggacttcatcaaggacctgcccatccggaaggtgtccggcatcggcaaggtgaccgagaagatgctgaaggccctgggcatcatcacctgcaccgagctgtaccagcagcgggccctgctgtccctgctgttctccgagacctcctggcactacttcctgcacatctccctgggcctgggctccacccacctgacccgggaccgggtgcggaagtccatgtccgtggagcggaccttctccgagatcaacaaggccgaggagcagtactccctgtgccaggagctgtgctccgagctggcccaggacctgcagaaggagcggctgaagggccggaccgtgaccatcaagctgaagaacgtgaacttcgaggtgaagacccgggcctccaccgtgtcctccgtggtgtccaccgccgaggagatcttcgccatcgccaaggagctgctgaagaccgagatcgacgccgacttcccccaccccctgcggctgcggctgatgggcgtgcggatctcctccttccccaacgaggaggaccggaagcaccagcagggcggcggctccggcaagcggaccgccgacggctccggcggcggctcccccaagaagaagcggaaggtgtagctagcaccagcctcaagaacacccgaatggagtctctaagctacataataccaacttacactttacaaaatgttgtcccccaaaatgtagccattcgtatctgctcctaataaaaagaaagtttcttcacattctctcgagaaaaaaaaaaaatggaaaaaaaaaaaacggaaaaaaaaaaaaggtaaaaaaaaaaaatataaaaaaaaaaaacataaaaaaaaaaaacgaaaaaaaaaaaacgtaaaaaaaaaaaactcaaaaaaaaaaaagataaaaaaaaaaaacctaaaaaaaaaaaatgtaaaaaaaaaaaagggaaaaaaaaaaaacgcaaaaaaaaaaaacacaaaaaaaaaaaatgcaaaaaaaaaaaatcgaaaaaaaaaaaatctaaaaaaaaaaaacgaaaaaaaaaaaacccaaaaaaaaaaaagacaaaaaaaaaaaatagaaaaaaaaaaagttaaaaaaaaaaaactgaaaaaaaaaaaatttaaaaaaaaaaaatctag

SEQ ID NO: 2637 - DNA, 6559 bp, synthetic construct
  misc_feature 1..6559: note = Synthetic
  source 1..6559: mol_type = other DNA
aggactcactatttgttttcgcgcccagttgcaaaaagtgtcgaaaaaaaaaaaaccaaaaaaaaaaaacaaaaaaaaaaaataattgactaaaagctcagaataaacgctcaactttggccggatctgccaccatgaagcggaccgccgacggctccgagttcgagtcccccaagaagaagcggaaggtggacaagaagtactccatcggcctggacatcggcaccaactccgtgggctgggccgtgatcaccgacgagtacaaggtgccctccaagaagttcaaggtgctgggcaacaccgaccggcactccatcaagaagaacctgatcggcgccctgctgttcgactccggcgagaccgccgaggccacccggctgaagcggaccgcccggcggcggtacacccggcggaagaaccggatctgctacctgcaggagatcttctccaacgagatggccaaggtggacgactccttcttccaccggctggaggagtccttcctggtggaggaggacaagaagcacgagcggcaccccatcttcggcaacatcgtggacgaggtggcctaccacgagaagtaccccaccatctaccacctgcggaagaagctggtggactccaccgacaaggccgacctgcggctgatctacctggccctggcccacatgatcaagttccggggccacttcctgatcgagggcgacctgaaccccgacaactccgacgtggacaagctgttcatccagctggtgcagacctacaaccagctgttcgaggagaaccccatcaacgcctccggcgtggacgccaaggccatcctgtccgcccggctgtccaagtcccggcggctggagaacctgatcgcccagctgcccggcgagaagaagaacggcctgttcggcaacctgatcgccctgtccctgggcctgacccccaacttcaagtccaacttcgacctggccgaggacgccaagctgcagctgtccaaggacacctacgacgacgacctggacaacctgctggcccagatcggcgaccagtacgccgacctgttcctggccgccaagaacctgtccgacgccatcctgctgtccgacatcctgcgggtgaacaccgagatcaccaaggcccccctgtccgcctccatgatcaagcggtacgacgagcaccaccaggacctgaccctgctgaaggccctggtgcggcagcagctgcccgagaagtacaaggagatcttcttcgaccagtccaagaacggctacgccggctacatcgacggcggcgcctcccaggaggagttctacaagttcatcaagcccatcctggagaagatggacggcaccgaggagctgctggtgaagctgaaccgggaggacctgctgcggaagcagcggaccttcgacaacggctccatcccccaccagatccacctgggcgagctgcacgccatcctgcggcggcaggaggacttctaccccttcctgaaggacaaccgggagaagatcgagaagatcctgaccttccggatcccctactacgtgggccccctggcccggggcaactcccggttcgcctggatgacccggaagtccgaggagaccatcaccccctggaacttcgaggaggtggtggacaagggcgcctccgcccagtccttcatcgagcggatgaccaacttcgacaagaacctgcccaacgagaaggtgctgcccaagcactccctgctgtacgagtacttcaccgtgtacaacgagctgaccaaggtgaagtacgtgaccgagggcatgcggaagcccgccttcctgtccggcgagcagaagaaggccatcgtggacctgctgttcaagaccaaccggaaggtgaccgtgaagcagctgaaggaggactacttcaagaagatcgagtgcttcgactccgtggagatctccggcgtggaggaccggttcaacgcctccctgggcacctaccacgacctgctgaagatcatcaaggacaaggacttcctggacaacgaggagaacgaggacatcctggaggacatcgtgctgaccctgaccctgttcgaggaccgggagatgatcgaggagcggctgaagacctacgcccacctgttcgacgacaaggtgatgaagcagctgaagcggcggcggtacaccggctggggccggctgtcccggaagctgatcaacggcatccgggacaagcagtccggcaagaccatcctggacttcctgaagtccgacggcttcgccaaccggaacttcatgcagctgatccacgacgactccctgaccttcaaggaggacatccagaaggcccaggtgtccggccagggcgactccctgcacgagcacatcgccaacctggccggctcccccgccatcaagaagggcatcctgcagaccgtgaaggtggtggacgagctggtgaaggtgatgggccggcacaagcccgagaacatcgtgatcgagatggcccgggagaaccagaccacccagaagggccagaagaactcccgggagcggatgaagcggatcgaggagggcatcaaggagctgggctcccagatcctgaaggagcaccccgtggagaacacccagctgcagaacgagaagctgtacctgtactacctgcagaacggccgggacatgtacgtggaccaggagctggacatcaaccggctgtccgactacgacgtggacgccatcgtgccccagtccttcctgaaggacgactccatcgacaacaaggtgctgacccggtccgacaagaaccggggcaagtccgacaacgtgccctccgaggaggtggtgaagaagatgaagaactactggcggcagctgctgaacgccaagctgatcacccagcggaagttcgacaacctgaccaaggccgagcggggcggcctgtccgagctggacaaggccggcttcatcaagcggcagctggtggagacccggcagatcaccaagcacgtggcccagatcctggactcccggatgaacaccaagtacgacgagaacgacaagctgatccgggaggtgaaggtgatcaccctgaagtccaagctggtgtccgacttccggaaggacttccagttctacaaggtgcgggagatcaacaactaccaccacgcccacgacgcctacctgaacgccgtggtgggcaccgccctgatcaagaagtaccccaagctggagtccgagttcgtgtacggcgactacaaggtgtacgacgtgcggaagatgatcgccaagtccgagcaggagatcggcaaggccaccgccaagtacttcttctactccaacatcatgaacttcttcaagaccgagatcaccctggccaacggcgagatccggaagcggcccctgatcgagaccaacggcgagaccggcgagatcgtgtgggacaagggccgggacttcgccaccgtgcggaaggtgctgtccatgccccaggtgaacatcgtgaagaagaccgaggtgcagaccggcggcttctccaaggagtccatcctgcccaagcggaactccgacaagctgatcgcccggaagaaggactgggaccccaagaagtacggcggcttcgactcccccaccgtggcctactccgtgctggtggtggccaaggtggagaagggcaagtccaagaagctgaagtccgtgaaggagctgctgggcatcaccatcatggagcggtcctccttcgagaagaaccccatcgacttcctggaggccaagggctacaaggaggtgaagaaggacctgatcatcaagctgcccaagtactccctgttcgagctggagaacggccggaagcggatgctggcctccgccggcgagctgcagaagggcaacgagctggccctgccctccaagtacgtgaacttcctgtacctggcctcccactacgagaagctgaagggctcccccgaggacaacgagcagaagcagctgttcgtggagcagcacaagcactacctggacgagatcatcgagcagatctccgagttctccaagcgggtgatcctggccgacgccaacctggacaaggtgctgtccgcctacaacaagcaccgggacaagcccatccgggagcaggccgagaacatcatccacctgttcaccctgaccaacctgggcgcccccgccgccttcaagtacttcgacaccaccatcgaccggaagcggtacacctccaccaaggaggtgctggacgccaccctgatccaccagtccatcaccggcctgtacgagacccggatcgacctgtcccagctgggcggcgactccggcggctcctccggcggctccaagcggaccgccgacggctccgagttcgagtcccccaagaagaagcggaaggtgtccggcggctcctccggcggctccatggactccaccaaggagaagtgcgactcctacaaggacgacctgctgctgcggatgggcctgaacgacaacaaggccggcatggagggcctggacaaggagaagatcaacaagatcatcatggaggccaccaagggctcccggttctacggcaacgagctgaagaaggagaagcaggtgaaccagcggatcgagaacatgatgcagcagaaggcccagatcacctcccagcagctgcggaaggcccagctgcaggtggaccggttcgccatggagctggagcagtcccggaacctgtccaacaccatcgtgcacatcgacatggacgccttctacgccgccgtggagatgcgggacaaccccgagctgaaggacaagcccatcgccgtgggctccatgtccatgctgtccacctccaactaccacgcccggcggttcggcgtgcgggccgccatgcccggcttcatcgccaagcggctgtgcccccagctgatcatcgtgccccccaacttcgacaagtaccgggccgtgtccaaggaggtgaaggagatcctggccgactacgaccccaacttcatggccatgtccctggacgaggcctacctgaacatcaccaagcacctggaggagcggcagaactggcccgaggacaagcggcggtacttcatcaagatgggctcctccgtggagaacgacaaccccggcaaggaggtgaacaagctgtccgagcacgagcggtccatctcccccctgctgttcgaggagtccccctccgacgtgcagccccccggcgaccccttccaggtgaacttcgaggagcagaacaacccccagatcctgcagaactccgtggtgttcggcacctccgcccaggaggtggtgaaggagatccggttccggatcgagcagaagaccaccctgaccgcctccgccggcatcgcccccaacaccatgctggccaaggtgtgctccgacaagaacaagcccaacggccagtaccagatcctgcccaaccggcaggccgtgatggacttcatcaaggacctgcccatccggaaggtgtccggcatcggcaaggtgaccgagaagatgctgaaggccctgggcatcatcacctgcaccgagctgtaccagcagcgggccctgctgtccctgctgttctccgagacctcctggcactacttcctgcacatctccctgggcctgggctccacccacctgacccgggaccgggtgcggaagtccatgtccgtggagcggaccttctccgagatcaacaaggccgaggagcagtactccctgtgccaggagctgtgctccgagctggcccaggacctgcagaaggagcggctgaagggccggaccgtgaccatcaagctgaagaacgtgaacttcgaggtgaagacccgggcctccaccgtgtcctccgtggtgtccaccgccgaggagatcttcgccatcgccaaggagctgctgaagaccgagatcgacgccgacttcccccaccccctgcggctgcggctgatgggcgtgcggatctcctccttccccaacgaggaggaccggaagcaccagcagggcggcggctccggcaagcggaccgccgacggctccggcggcggctcccccaagaagaagcggaaggtgtagctagcaccagcctcaagaacacccgaatggagtctctaagctacataataccaacttacactttacaaaatgttgtcccccaaaatgtagccattcgtatctgctcctaataaaaagaaagtttcttcacattctctcgagaaaaaaaaaaaatggaaaaaaaaaaaacggaaaaaaaaaaaaggtaaaaaaaaaaaatataaaaaaaaaaaacataaaaaaaaaaaacgaaaaaaaaaaaacgtaaaaaaaaaaaactcaaaaaaaaaaaagataaaaaaaaaaaacctaaaaaaaaaaaatgtaaaaaaaaaaaagggaaaaaaaaaaaacgcaaaaaaaaaaaacacaaaaaaaaaaaatgcaaaaaaaaaaaatcgaaaaaaaaaaaatctaaaaaaaaaaaacgaaaaaaaaaaaacccaaaaaaaaaaaagacaaaaaaaaaaaatagaaaaaaaaaaagttaaaaaaaaaaaactgaaaaaaaaaaaatttaaaaaaaaaaaatctag

SEQ ID NO: 2638 - DNA, 6469 bp, synthetic construct
  misc_feature 1..6469: note = Synthetic
  source 1..6469: mol_type = other DNA
aggaagctcagaataaacgctcaactttggccggatctgccaccatgaagcggactgcggacgggtccgagttcgagtctccgaagaagaagcgcaaggtcgataagaagtactccatcggcctggacatcggaactaacagtgttggctgggccgtgatcactgatgagtacaaggtcccgtccaagaaattcaaggtgctgggtaacaccgatcgacatagtatcaagaagaacctgatcggggccctcttgttcgacagcggcgagactgctgaggcgacgcgcttgaagaggacggcccggcgtcgatacacccgacgcaagaatcggatttgctatctccaggagatcttctccaacgagatggcaaaggtggacgactcgttcttccaccgcctcgaggagagctttctcgtcgaggaggacaagaagcacgagcgccaccccatattcgggaatatcgtggatgaggtcgcctatcacgagaagtaccccacgatttatcatttgcgcaagaagctggtagattcaaccgacaaggcggacttgcggttgatctacctagctcttgcgcatatgataaagtttcgggggcacttcttgattgaaggcgacctcaatcccgataactcggatgtggacaagctcttcatacagctggtgcagacctacaaccagctgtttgaagagaatccgattaatgcgtcgggtgtcgacgccaaggccatcctcagcgcgcgcctcagcaagtctcgccgccttgagaatctgattgcccagctcccgggcgagaagaagaacgggttgttcggtaaccttattgcgctgtcgcttggcctcactccgaacttcaagtcgaacttcgacttggcggaggacgccaagctgcagctcagtaaggatacctacgacgacgacctggacaatcttctcgcccagatcggcgaccagtacgccgatctcttcctggcggcgaagaatctgagcgatgcaattctcctgagtgacattctgagggtgaatactgaaattacgaaggctccgctgtctgccagcatgatcaagcggtacgatgagcatcaccaggacctgacgctcctcaaggctctcgtccgtcagcagctcccggagaagtacaaggagatcttcttcgaccagtcgaagaacggatacgccgggtacatcgacgggggcgcttcccaggaggagttttataagtttataaagcccatcctggagaagatggacgggaccgaggagctcctggtgaagctcaaccgcgaggatctgctgcgcaagcagcggaccttcgataatggcagtattccccatcagattcacttaggagagttgcacgcgattcttcgccgccaggaagacttctaccccttcctcaaagataacagggagaagatcgagaagatcctcaccttccgcatcccgtattacgtgggtcccctggcgcgggggaactcacgttttgcgtggatgacgcggaagagtgaggagacgatcactccctggaactttgaggaagtggtagacaagggtgcttcggcacagtccttcatcgagcggatgacaaattttgacaagaatttgccgaacgagaaggtcttgccgaagcactcgctgctttacgagtactttacggtttacaacgagttgacgaaggtcaagtacgtcactgagggaatgcggaagcccgcattcctcagtggcgaacagaagaaggccatcgtcgacttgttgttcaagacgaaccgtaaagtaaccgtgaagcagctgaaggaggactacttcaagaagatcgagtgcttcgactccgttgagatcagcggagtcgaagaccgatttaatgcctccctcggtacgtatcatgatctcctcaagattatcaaggataaggacttccttgataatgaggagaatgaggatattctcgaggacattgtgctgaccctcaccctgttcgaagaccgtgagatgattgaggaacggttgaagacctacgctcatctgtttgatgacaaggtcatgaagcagttgaagcgtaggcgttataccggctggggtcgtctttcccgaaagcttatcaacgggatccgtgataagcagtcgggaaagacgatcctagacttcctcaagtctgacggttttgcgaacaggaacttcatgcagctcatccacgacgactccttgaccttcaaggaggatatccagaaggcgcaggtgagcggccagggcgatagcttgcacgagcatatcgcgaacctggccggctcacctgcgatcaagaagggtatcctccagacggtcaaggtcgtggatgagctcgtgaaggtgatgggtcggcacaagcccgagaatatcgtcatcgagatggctcgcgagaatcagacgacccagaagggtcagaagaattctcgcgagcgcatgaagcgtatcgaggagggcattaaggagctgggcagtcagattctcaaggagcaccctgtcgagaacacgcagcttcagaacgagaagctgtatctttactacctccagaacggacgggacatgtacgtagatcaggagctggacatcaaccggctctctgactacgatgtggacgctatagtgcctcagagctttctgaaggacgatagcatcgacaacaaggtcctgactcgctccgataagaatcggggcaagtcggacaatgtcccgtccgaggaggtagtgaagaagatgaagaactattggcgtcagctgttgaacgcgaagctgatcactcagagaaagttcgataatctcaccaaggccgagagggggggtctgagcgagcttgataaggcgggtttcatcaagcggcagcttgttgagacccgccagatcacgaagcacgtcgctcagatcctcgactctcggatgaacaccaagtacgacgagaatgacaagcttattcgggaggtcaaggtcattacccttaagtcgaagctcgtcagcgactttcgcaaggattttcagttttataaagttcgtgagataaacaattatcaccatgcccacgacgcgtacctgaacgccgtcgtgggcacggcgctgataaagaagtacccgaagctggagtccgagttcgtttatggcgattataaggtgtacgacgtgcgcaagatgatcgccaagagcgagcaggagatcggaaaggctacggcgaagtacttcttttacagcaacatcatgaacttttttaagactgagatcacccttgcgaatggcgagatccgcaagcgcccgttgatcgagacgaacggggagactggggagattgtgtgggataagggtcgggatttcgctacggtgagaaaggttctttcgatgccccaggtcaacatcgtcaagaagacggaggttcagaccgggggcttctcgaaagaatctatcttaccgaagcgaaattccgacaagcttatcgcacgcaagaaggactgggaccccaagaagtacggggggttcgacagtcctacggtggcctactccgtgttggtggtcgccaaggttgagaagggcaagagcaagaagctcaagtccgtcaaggagctcttggggatcaccatcatggagaggtcatcgtttgagaagaatcctattgacttccttgaagccaagggctacaaggaagtcaagaaggatttgatcatcaagctccccaagtactccctgttcgagctcgagaacgggcgcaagcggatgctcgccagcgctggcgagcttcagaagggtaatgagcttgccctcccgagtaagtatgtcaatttcttgtacttggcgtcgcactacgagaagctgaagggctcgccggaggacaacgagcagaagcagcttttcgtagagcagcacaagcactaccttgatgagattatcgagcagatctctgagttcagcaagcgcgttatactagctgacgccaatctcgacaaggtgctctcggcttataacaagcaccgggataagccgatacgtgagcaggcggagaacatcatccacctgttcacgttgacgaacttgggggccccggcagcgttcaagtattttgatactacgatcgatcggaagcgttacaccagcaccaaggaggtcttggacgcgaccttgattcatcagtcgatcacgggtctttacgagactcgaattgacctttctcagcttggtggtgacagtggcggctcttcaggcggctccaagaggactgcggatggttctgaattcgaatcacctaagaagaagcggaaggtctccggggggtcgtccgggggctctatggacagcacgaaggagaagtgcgactcttataaggatgacctgcttctccggatggggctcaatgacaataaagccgggatggagggcctcgataaggagaagatcaacaagatcatcatggaggccactaaggggtcccggttttatggcaatgagctcaagaaggagaagcaggtcaaccagcgcatcgagaacatgatgcagcagaaggctcagataactagtcagcagctgcgcaaggcgcagctgcaggtggacagattcgccatggagctcgagcagtcgcgcaacttgagcaacacgattgtccacatcgacatggacgcgttctacgcggccgtggagatgcgggacaatcctgagctcaaggacaagccgattgctgtgggctccatgtcgatgctgtccacctctaactaccatgcccggaggttcggtgtccgcgctgctatgcccggctttatagcgaagcgcctctgtcctcagctaattatcgttcctccaaacttcgataagtacagggccgtgtccaaggaggtcaaggagattctggcggactacgacccgaatttcatggccatgtccttggacgaggcgtacctgaacattacgaagcatttggaggagcgacagaattggcctgaggacaagaggcgctactttataaagatgggcagcagcgtggagaacgataatccgggcaaggaagttaacaagttgtctgagcatgagaggagcatttctcctttgctgttcgaggagagcccctcggacgtgcagccccccggagacccgtttcaggtgaacttcgaagagcagaacaatccgcagatcctccagaacagcgtggtgttcggcacgagtgcccaggaggtggtcaaggagattcgttttcgcatcgagcagaagacgaccttgaccgcctccgcgggcatcgcgccgaacaccatgctggccaaggtttgttctgacaagaacaagcctaatggccagtaccagatcctcccaaaccgtcaagccgtgatggacttcatcaaggacctgccgattcggaaggtatctggtatcggtaaggttaccgagaagatgctgaaggccctgggcatcataacttgcacagagctctaccagcagcgagcgctcctcagcctgttgttctccgagacctcttggcactactttcttcacatctctctgggcctgggctcgacccacttgacccgagaccgagtgaggaagagtatgagtgtcgagaggaccttctcggagatcaacaaggctgaggagcagtactcgctgtgccaggagctctgtagcgagttagcccaggaccttcagaaggagcgcctgaagggccgcactgtcaccatcaagctgaagaatgtcaacttcgaggtgaagacccgggccagcactgttagttccgtggtgtccacggccgaggagatcttcgctatcgccaaggagcttcttaagacggagatcgacgcggactttccgcatccgcttcgcctccgccttatgggcgtccggatctcctcgtttcctaacgaggaggaccggaagcaccagcaaggcggaggctcaggcaagcggaccgctgacggctccggggggggctctccgaaaaagaagcggaaggtttgactagcaccagcctcaagaacacccgaatggagtctctaagctacataataccaacttacactttacaaaatgttgtcccccaaaatgtagccattcgtatctgctcctaataaaaagaaagtttcttcacattctctcgagaaaaaaaaaaaatggaaaaaaaaaaaacggaaaaaaaaaaaaggtaaaaaaaaaaaatataaaaaaaaaaaacataaaaaaaaaaaacgaaaaaaaaaaaacgtaaaaaaaaaaaactcaaaaaaaaaaaagataaaaaaaaaaaacctaaaaaaaaaaaatgtaaaaaaaaaaaagggaaaaaaaaaaaacgcaaaaaaaaaaaacacaaaaaaaaaaaatgcaaaaaaaaaaaatcgaaaaaaaaaaaatctaaaaaaaaaaaacgaaaaaaaaaaaacccaaaaaaaaaaaagacaaaaaaaaaaaatagaaaaaaaaaaagttaaaaaaaaaaaactgaaaaaaaaaaaatttaaaaaaaaaaaatctag

SEQ ID NO: 2639 - DNA, 6509 bp, synthetic construct
  misc_feature 1..6509: note = Synthetic
  source 1..6509: mol_type = other DNA
aggactcactatttgttttcgcgcccagttgcaaaaagtgtcgaagctcagaataaacgctcaactttggccggatctgccaccatgaagcggactgcggacgggtccgagttcgagtctccgaagaagaagcgcaaggtcgataagaagtactccatcggcctggacatcggaactaacagtgttggctgggccgtgatcactgatgagtacaaggtcccgtccaagaaattcaaggtgctgggtaacaccgatcgacatagtatcaagaagaacctgatcggggccctcttgttcgacagcggcgagactgctgaggcgacgcgcttgaagaggacggcccggcgtcgatacacccgacgcaagaatcggatttgctatctccaggagatcttctccaacgagatggcaaaggtggacgactcgttcttccaccgcctcgaggagagctttctcgtcgaggaggacaagaagcacgagcgccaccccatattcgggaatatcgtggatgaggtcgcctatcacgagaagtaccccacgatttatcatttgcgcaagaagctggtagattcaaccgacaaggcggacttgcggttgatctacctagctcttgcgcatatgataaagtttcgggggcacttcttgattgaaggcgacctcaatcccgataactcggatgtggacaagctcttcatacagctggtgcagacctacaaccagctgtttgaagagaatccgattaatgcgtcgggtgtcgacgccaaggccatcctcagcgcgcgcctcagcaagtctcgccgccttgagaatctgattgcccagctcccgggcgagaagaagaacgggttgttcggtaaccttattgcgctgtcgcttggcctcactccgaacttcaagtcgaacttcgacttggcggaggacgccaagctgcagctcagtaaggatacctacgacgacgacctggacaatcttctcgcccagatcggcgaccagtacgccgatctcttcctggcggcgaagaatctgagcgatgcaattctcctgagtgacattctgagggtgaatactgaaattacgaaggctccgctgtctgccagcatgatcaagcggtacgatgagcatcaccaggacctgacgctcctcaaggctctcgtccgtcagcagctcccggagaagtacaaggagatcttcttcgaccagtcgaagaacggatacgccgggtacatcgacgggggcgcttcccaggaggagttttataagtttataaagcccatcctggagaagatggacgggaccgaggagctcctggtgaagctcaaccgcgaggatctgctgcgcaagcagcggaccttcgataatggcagtattccccatcagattcacttaggagagttgcacgcgattcttcgccgccaggaagacttctaccccttcctcaaagataacagggagaagatcgagaagatcctcaccttccgcatcccgtattacgtgggtcccctggcgcgggggaactcacgttttgcgtggatgacgcggaagagtgaggagacgatcactccctggaactttgaggaagtggtagacaagggtgcttcggcacagtccttcatcgagcggatgacaaattttgacaagaatttgccgaacgagaaggtcttgccgaagcactcgctgctttacgagtactttacggtttacaacgagttgacgaaggtcaagtacgtcactgagggaatgcggaagcccgcattcctcagtggcgaacagaagaaggccatcgtcgacttgttgttcaagacgaaccgtaaagtaaccgtgaagcagctgaaggaggactacttcaagaagatcgagtgcttcgactccgttgagatcagcggagtcgaagaccgatttaatgcctccctcggtacgtatcatgatctcctcaagattatcaaggataaggacttccttgataatgaggagaatgaggatattctcgaggacattgtgctgaccctcaccctgttcgaagaccgtgagatgattgaggaacggttgaagacctacgctcatctgtttgatgacaaggtcatgaagcagttgaagcgtaggcgttataccggctggggtcgtctttcccgaaagcttatcaacgggatccgtgataagcagtcgggaaagacgatcctagacttcctcaagtctgacggttttgcgaacaggaacttcatgcagctcatccacgacgactccttgaccttcaaggaggatatccagaaggcgcaggtgagcggccagggcgatagcttgcacgagcatatcgcgaacctggccggctcacctgcgatcaagaagggtatcctccagacggtcaaggtcgtggatgagctcgtgaaggtgatgggtcggcacaagcccgagaatatcgtcatcgagatggctcgcgagaatcagacgacccagaagggtcagaagaattctcgcgagcgcatgaagcgtatcgaggagggcattaaggagctgggcagtcagattctcaaggagcaccctgtcgagaacacgcagcttcagaacgagaagctgtatctttactacctccagaacggacgggacatgtacgtagatcaggagctggacatcaaccggctctctgactacgatgtggacgctatagtgcctcagagctttctgaaggacgatagcatcgacaacaaggtcctgactcgctccgataagaatcggggcaagtcggacaatgtcccgtccgaggaggtagtgaagaagatgaagaactattggcgtcagctgttgaacgcgaagctgatcactcagagaaagttcgataatctcaccaaggccgagagggggggtctgagcgagcttgataaggcgggtttcatcaagcggcagcttgttgagacccgccagatcacgaagcacgtcgctcagatcctcgactctcggatgaacaccaagtacgacgagaatgacaagcttattcgggaggtcaaggtcattacccttaagtcgaagctcgtcagcgactttcgcaaggattttcagttttataaagttcgtgagataaacaattatcaccatgcccacgacgcgtacctgaacgccgtcgtgggcacggcgctgataaagaagtacccgaagctggagtccgagttcgtttatggcgattataaggtgtacgacgtgcgcaagatgatcgccaagagcgagcaggagatcggaaaggctacggcgaagtacttcttttacagcaacatcatgaacttttttaagactgagatcacccttgcgaatggcgagatccgcaagcgcccgttgatcgagacgaacggggagactggggagattgtgtgggataagggtcgggatttcgctacggtgagaaaggttctttcgatgccccaggtcaacatcgtcaagaagacggaggttcagaccgggggcttctcgaaagaatctatcttaccgaagcgaaattccgacaagcttatcgcacgcaagaaggactgggaccccaagaagtacggggggttcgacagtcctacggtggcctactccgtgttggtggtcgccaaggttgagaagggcaagagcaagaagctcaagtccgtcaaggagctcttggggatcaccatcatggagaggtcatcgtttgagaagaatcctattgacttccttgaagccaagggctacaaggaagtcaagaaggatttgatcatcaagctccccaagtactccctgttcgagctcgagaacgggcgcaagcggatgctcgccagcgctggcgagcttcagaagggtaatgagcttgccctcccgagtaagtatgtcaatttcttgtacttggcgtcgcactacgagaagctgaagggctcgccggaggacaacgagcagaagcagcttttcgtagagcagcacaagcactaccttgatgagattatcgagcagatctctgagttcagcaagcgcgttatactagctgacgccaatctcgacaaggtgctctcggcttataacaagcaccgggataagccgatacgtgagcaggcggagaacatcatccacctgttcacgttgacgaacttgggggccccggcagcgttcaagtattttgatactacgatcgatcggaagcgttacaccagcaccaaggaggtcttggacgcgaccttgattcatcagtcgatcacgggtctttacgagactcgaattgacctttctcagcttggtggtgacagtggcggctcttcaggcggctccaagaggactgcggatggttctgaattcgaatcacctaagaagaagcggaaggtctccggggggtcgtccgggggctctatggacagcacgaaggagaagtgcgactcttataaggatgacctgcttctccggatggggctcaatgacaataaagccgggatggagggcctcgataaggagaagatcaacaagatcatcatggaggccactaaggggtcccggttttatggcaatgagctcaagaaggagaagcaggtcaaccagcgcatcgagaacatgatgcagcagaaggctcagataactagtcagcagctgcgcaaggcgcagctgcaggtggacagattcgccatggagctcgagcagtcgcgcaacttgagcaacacgattgtccacatcgacatggacgcgttctacgcggccgtggagatgcgggacaatcctgagctcaaggacaagccgattgctgtgggctccatgtcgatgctgtccacctctaactaccatgcccggaggttcggtgtccgcgctgctatgcccggctttatagcgaagcgcctctgtcctcagctaattatcgttcctccaaacttcgataagtacagggccgtgtccaaggaggtcaaggagattctggcggactacgacccgaatttcatggccatgtccttggacgaggcgtacctgaacattacgaagcatttggaggagcgacagaattggcctgaggacaagaggcgctactttataaagatgggcagcagcgtggagaacgataatccgggcaaggaagttaacaagttgtctgagcatgagaggagcatttctcctttgctgttcgaggagagcccctcggacgtgcagccccccggagacccgtttcaggtgaacttcgaagagcagaacaatccgcagatcctccagaacagcgtggtgttcggcacgagtgcccaggaggtggtcaaggagattcgttttcgcatcgagcagaagacgaccttgaccgcctccgcgggcatcgcgccgaacaccatgctggccaaggtttgttctgacaagaacaagcctaatggccagtaccagatcctcccaaaccgtcaagccgtgatggacttcatcaaggacctgccgattcggaaggtatctggtatcggtaaggttaccgagaagatgctgaaggccctgggcatcataacttgcacagagctctaccagcagcgagcgctcctcagcctgttgttctccgagacctcttggcactactttcttcacatctctctgggcctgggctcgacccacttgacccgagaccgagtgaggaagagtatgagtgtcgagaggaccttctcggagatcaacaaggctgaggagcagtactcgctgtgccaggagctctgtagcgagttagcccaggaccttcagaaggagcgcctgaagggccgcactgtcaccatcaagctgaagaatgtcaacttcgaggtgaagacccgggccagcactgttagttccgtggtgtccacggccgaggagatcttcgctatcgccaaggagcttcttaagacggagatcgacgcggactttccgcatccgcttcgcctccgccttatgggcgtccggatctcctcgtttcctaacgaggaggaccggaagcaccagcaaggcggaggctcaggcaagcggaccgctgacggctccggggggggctctccgaaaaagaagcggaaggtttgactagcaccagcctcaagaacacccgaatggagtctctaagctacataataccaacttacactttacaaaatgttgtcccccaaaatgtagccattcgtatctgctcctaataaaaagaaagtttcttcacattctctcgagaaaaaaaaaaaatggaaaaaaaaaaaacggaaaaaaaaaaaaggtaaaaaaaaaaaatataaaaaaaaaaaacataaaaaaaaaaaacgaaaaaaaaaaaacgtaaaaaaaaaaaactcaaaaaaaaaaaagataaaaaaaaaaaacctaaaaaaaaaaaatgtaaaaaaaaaaaagggaaaaaaaaaaaacgcaaaaaaaaaaaacacaaaaaaaaaaaatgcaaaaaaaaaaaatcgaaaaaaaaaaaatctaaaaaaaaaaaacgaaaaaaaaaaaacccaaaaaaaaaaaagacaaaaaaaaaaaatagaaaaaaaaaaagttaaaaaaaaaaaactgaaaaaaaaaaaatttaaaaaaaaaaaatctag

SEQ ID NO: 2640 - DNA, 6563 bp, synthetic construct
  misc_feature 1..6563: note = Synthetic
  source 1..6563: mol_type = other DNA
aggaagctcagaataaacgctcaactttggccggatctgccaccatgaagcggactgcggacgggtccgagttcgagtctccgaagaagaagcgcaaggtcgataagaagtactccatcggcctggacatcggaactaacagtgttggctgggccgtgatcactgatgagtacaaggtcccgtccaagaaattcaaggtgctgggtaacaccgatcgacatagtatcaagaagaacctgatcggggccctcttgttcgacagcggcgagactgctgaggcgacgcgcttgaagaggacggcccggcgtcgatacacccgacgcaagaatcggatttgctatctccaggagatcttctccaacgagatggcaaaggtggacgactcgttcttccaccgcctcgaggagagctttctcgtcgaggaggacaagaagcacgagcgccaccccatattcgggaatatcgtggatgaggtcgcctatcacgagaagtaccccacgatttatcatttgcgcaagaagctggtagattcaaccgacaaggcggacttgcggttgatctacctagctcttgcgcatatgataaagtttcgggggcacttcttgattgaaggcgacctcaatcccgataactcggatgtggacaagctcttcatacagctggtgcagacctacaaccagctgtttgaagagaatccgattaatgcgtcgggtgtcgacgccaaggccatcctcagcgcgcgcctcagcaagtctcgccgccttgagaatctgattgcccagctcccgggcgagaagaagaacgggttgttcggtaaccttattgcgctgtcgcttggcctcactccgaacttcaagtcgaacttcgacttggcggaggacgccaagctgcagctcagtaaggatacctacgacgacgacctggacaatcttctcgcccagatcggcgaccagtacgccgatctcttcctggcggcgaagaatctgagcgatgcaattctcctgagtgacattctgagggtgaatactgaaattacgaaggctccgctgtctgccagcatgatcaagcggtacgatgagcatcaccaggacctgacgctcctcaaggctctcgtccgtcagcagctcccggagaagtacaaggagatcttcttcgaccagtcgaagaacggatacgccgggtacatcgacgggggcgcttcccaggaggagttttataagtttataaagcccatcctggagaagatggacgggaccgaggagctcctggtgaagctcaaccgcgaggatctgctgcgcaagcagcggaccttcgataatggcagtattccccatcagattcacttaggagagttgcacgcgattcttcgccgccaggaagacttctaccccttcctcaaagataacagggagaagatcgagaagatcctcaccttccgcatcccgtattacgtgggtcccctggcgcgggggaactcacgttttgcgtggatgacgcggaagagtgaggagacgatcactccctggaactttgaggaagtggtagacaagggtgcttcggcacagtccttcatcgagcggatgacaaattttgacaagaatttgccgaacgagaaggtcttgccgaagcactcgctgctttacgagtactttacggtttacaacgagttgacgaaggtcaagtacgtcactgagggaatgcggaagcccgcattcctcagtggcgaacagaagaaggccatcgtcgacttgttgttcaagacgaaccgtaaagtaaccgtgaagcagctgaaggaggactacttcaagaagatcgagtgcttcgactccgttgagatcagcggagtcgaagaccgatttaatgcctccctcggtacgtatcatgatctcctcaagattatcaaggataaggacttccttgataatgaggagaatgaggatattctcgaggacattgtgctgaccctcaccctgttcgaagaccgtgagatgattgaggaacggttgaagacctacgctcatctgtttgatgacaaggtcatgaagcagttgaagcgtaggcgttataccggctggggtcgtctttcccgaaagcttatcaacgggatccgtgataagcagtcgggaaagacgatcctagacttcctcaagtctgacggttttgcgaacaggaacttcatgcagctcatccacgacgactccttgaccttcaaggaggatatccagaaggcgcaggtgagcggccagggcgatagcttgcacgagcatatcgcgaacctggccggctcacctgcgatcaagaagggtatcctccagacggtcaaggtcgtggatgagctcgtgaaggtgatgggtcggcacaagcccgagaatatcgtcatcgagatggctcgcgagaatcagacgacccagaagggtcagaagaattctcgcgagcgcatgaagcgtatcgaggagggcattaaggagctgggcagtcagattctcaaggagcaccctgtcgagaacacgcagcttcagaacgagaagctgtatctttactacctccagaacggacgggacatgtacgtagatcaggagctggacatcaaccggctctctgactacgatgtggacgctatagtgcctcagagctttctgaaggacgatagcatcgacaacaaggtcctgactcgctccgataagaatcggggcaagtcggacaatgtcccgtccgaggaggtagtgaagaagatgaagaactattggcgtcagctgttgaacgcgaagctgatcactcagagaaagttcgataatctcaccaaggccgagagggggggtctgagcgagcttgataaggcgggtttcatcaagcggcagcttgttgagacccgccagatcacgaagcacgtcgctcagatcctcgactctcggatgaacaccaagtacgacgagaatgacaagcttattcgggaggtcaaggtcattacccttaagtcgaagctcgtcagcgactttcgcaaggattttcagttttataaagttcgtgagataaacaattatcaccatgcccacgacgcgtacctgaacgccgtcgtgggcacggcgctgataaagaagtacccgaagctggagtccgagttcgtttatggcgattataaggtgtacgacgtgcgcaagatgatcgccaagagcgagcaggagatcggaaaggctacggcgaagtacttcttttacagcaacatcatgaacttttttaagactgagatcacccttgcgaatggcgagatccgcaagcgcccgttgatcgagacgaacggggagactggggagattgtgtgggataagggtcgggatttcgctacggtgagaaaggttctttcgatgccccaggtcaacatcgtcaagaagacggaggttcagaccgggggcttctcgaaagaatctatcttaccgaagcgaaattccgacaagcttatcgcacgcaagaaggactgggaccccaagaagtacggggggttcgacagtcctacggtggcctactccgtgttggtggtcgccaaggttgagaagggcaagagcaagaagctcaagtccgtcaaggagctcttggggatcaccatcatggagaggtcatcgtttgagaagaatcctattgacttccttgaagccaagggctacaaggaagtcaagaaggatttgatcatcaagctccccaagtactccctgttcgagctcgagaacgggcgcaagcggatgctcgccagcgctggcgagcttcagaagggtaatgagcttgccctcccgagtaagtatgtcaatttcttgtacttggcgtcgcactacgagaagctgaagggctcgccggaggacaacgagcagaagcagcttttcgtagagcagcacaagcactaccttgatgagattatcgagcagatctctgagttcagcaagcgcgttatactagctgacgccaatctcgacaaggtgctctcggcttataacaagcaccgggataagccgatacgtgagcaggcggagaacatcatccacctgttcacgttgacgaacttgggggccccggcagcgttcaagtattttgatactacgatcgatcggaagcgttacaccagcaccaaggaggtcttggacgcgaccttgattcatcagtcgatcacgggtctttacgagactcgaattgacctttctcagcttggtggtgacagtggcggctcttcaggcggctccaagaggactgcggatggttctgaattcgaatcacctaagaagaagcggaaggtctccggggggtcgtccgggggctctatggacagcacgaaggagaagtgcgactcttataaggatgacctgcttctccggatggggctcaatgacaataaagccgggatggagggcctcgataaggagaagatcaacaagatcatcatggaggccactaaggggtcccggttttatggcaatgagctcaagaaggagaagcaggtcaaccagcgcatcgagaacatgatgcagcagaaggctcagataactagtcagcagctgcgcaaggcgcagctgcaggtggacagattcgccatggagctcgagcagtcgcgcaacttgagcaacacgattgtccacatcgacatggacgcgttctacgcggccgtggagatgcgggacaatcctgagctcaaggacaagccgattgctgtgggctccatgtcgatgctgtccacctctaactaccatgcccggaggttcggtgtccgcgctgctatgcccggctttatagcgaagcgcctctgtcctcagctaattatcgttcctccaaacttcgataagtacagggccgtgtccaaggaggtcaaggagattctggcggactacgacccgaatttcatggccatgtccttggacgaggcgtacctgaacattacgaagcatttggaggagcgacagaattggcctgaggacaagaggcgctactttataaagatgggcagcagcgtggagaacgataatccgggcaaggaagttaacaagttgtctgagcatgagaggagcatttctcctttgctgttcgaggagagcccctcggacgtgcagccccccggagacccgtttcaggtgaacttcgaagagcagaacaatccgcagatcctccagaacagcgtggtgttcggcacgagtgcccaggaggtggtcaaggagattcgttttcgcatcgagcagaagacgaccttgaccgcctccgcgggcatcgcgccgaacaccatgctggccaaggtttgttctgacaagaacaagcctaatggccagtaccagatcctcccaaaccgtcaagccgtgatggacttcatcaaggacctgccgattcggaaggtatctggtatcggtaaggttaccgagaagatgctgaaggccctgggcatcataacttgcacagagctctaccagcagcgagcgctcctcagcctgttgttctccgagacctcttggcactactttcttcacatctctctgggcctgggctcgacccacttgacccgagaccgagtgaggaagagtatgagtgtcgagaggaccttctcggagatcaacaaggctgaggagcagtactcgctgtgccaggagctctgtagcgagttagcccaggaccttcagaaggagcgcctgaagggccgcactgtcaccatcaagctgaagaatgtcaacttcgaggtgaagacccgggccagcactgttagttccgtggtgtccacggccgaggagatcttcgctatcgccaaggagcttcttaagacggagatcgacgcggactttccgcatccgcttcgcctccgccttatgggcgtccggatctcctcgtttcctaacgaggaggaccggaagcaccagcaaggcggaggctcaggcaagcggaccgctgacggctccggggggggctctccgaaaaagaagcggaaggtttgactagcaccagcctcaagaacacccgaatggagtctctaagctacataataccaacttacactttacaaaatgttgtcccccaaaatgtagccattcgtatctgctcctaataaaaagaaagtttcttcacattcttgtcagcccagaaccccacacgagttttgccactgctaagctgtgaggcagtgcaggctgggacagccgacctccaggttgcgaaaaacctggtctcgagaaaaaaaaaaaatggaaaaaaaaaaaacggaaaaaaaaaaaaggtaaaaaaaaaaaatataaaaaaaaaaaacataaaaaaaaaaaacgaaaaaaaaaaaacgtaaaaaaaaaaaactcaaaaaaaaaaaagataaaaaaaaaaaacctaaaaaaaaaaaatgtaaaaaaaaaaaagggaaaaaaaaaaaacgcaaaaaaaaaaaacacaaaaaaaaaaaatgcaaaaaaaaaaaatcgaaaaaaaaaaaatctaaaaaaaaaaaacgaaaaaaaaaaaacccaaaaaaaaaaaagacaaaaaaaaaaaatagaaaaaaaaaaagttaaaaaaaaaaaactgaaaaaaaaaaaatttaaaaaaaaaaaatctag

SEQ ID NO: 2641 - DNA, 6603 bp, synthetic construct
  misc_feature 1..6603: note = Synthetic
  source 1..6603: mol_type = other DNA
aggactcactatttgttttcgcgcccagttgcaaaaagtgtcgaagctcagaataaacgctcaactttggccggatctgccaccatgaagcggactgcggacgggtccgagttcgagtctccgaagaagaagcgcaaggtcgataagaagtactccatcggcctggacatcggaactaacagtgttggctgggccgtgatcactgatgagtacaaggtcccgtccaagaaattcaaggtgctgggtaacaccgatcgacatagtatcaagaagaacctgatcggggccctcttgttcgacagcggcgagactgctgaggcgacgcgcttgaagaggacggcccggcgtcgatacacccgacgcaagaatcggatttgctatctccaggagatcttctccaacgagatggcaaaggtggacgactcgttcttccaccgcctcgaggagagctttctcgtcgaggaggacaagaagcacgagcgccaccccatattcgggaatatcgtggatgaggtcgcctatcacgagaagtaccccacgatttatcatttgcgcaagaagctggtagattcaaccgacaaggcggacttgcggttgatctacctagctcttgcgcatatgataaagtttcgggggcacttcttgattgaaggcgacctcaatcccgataactcggatgtggacaagctcttcatacagctggtgcagacctacaaccagctgtttgaagagaatccgattaatgcgtcgggtgtcgacgccaaggccatcctcagcgcgcgcctcagcaagtctcgccgccttgagaatctgattgcccagctcccgggcgagaagaagaacgggttgttcggtaaccttattgcgctgtcgcttggcctcactccgaacttcaagtcgaacttcgacttggcggaggacgccaagctgcagctcagtaaggatacctacgacgacgacctggacaatcttctcgcccagatcggcgaccagtacgccgatctcttcctggcggcgaagaatctgagcgatgcaattctcctgagtgacattctgagggtgaatactgaaattacgaaggctccgctgtctgccagcatgatcaagcggtacgatgagcatcaccaggacctgacgctcctcaaggctctcgtccgtcagcagctcccggagaagtacaaggagatcttcttcgaccagtcgaagaacggatacgccgggtacatcgacgggggcgcttcccaggaggagttttataagtttataaagcccatcctggagaagatggacgggaccgaggagctcctggtgaagctcaaccgcgaggatctgctgcgcaagcagcggaccttcgataatggcagtattccccatcagattcacttaggagagttgcacgcgattcttcgccgccaggaagacttctaccccttcctcaaagataacagggagaagatcgagaagatcctcaccttccgcatcccgtattacgtgggtcccctggcgcgggggaactcacgttttgcgtggatgacgcggaagagtgaggagacgatcactccctggaactttgaggaagtggtagacaagggtgcttcggcacagtccttcatcgagcggatgacaaattttgacaagaatttgccgaacgagaaggtcttgccgaagcactcgctgctttacgagtactttacggtttacaacgagttgacgaaggtcaagtacgtcactgagggaatgcggaagcccgcattcctcagtggcgaacagaagaaggccatcgtcgacttgttgttcaagacgaaccgtaaagtaaccgtgaagcagctgaaggaggactacttcaagaagatcgagtgcttcgactccgttgagatcagcggagtcgaagaccgatttaatgcctccctcggtacgtatcatgatctcctcaagattatcaaggataaggacttccttgataatgaggagaatgaggatattctcgaggacattgtgctgaccctcaccctgttcgaagaccgtgagatgattgaggaacggttgaagacctacgctcatctgtttgatgacaaggtcatgaagcagttgaagcgtaggcgttataccggctggggtcgtctttcccgaaagcttatcaacgggatccgtgataagcagtcgggaaagacgatcctagacttcctcaagtctgacggttttgcgaacaggaacttcatgcagctcatccacgacgactccttgaccttcaaggaggatatccagaaggcgcaggtgagcggccagggcgatagcttgcacgagcatatcgcgaacctggccggctcacctgcgatcaagaagggtatcctccagacggtcaaggtcgtggatgagctcgtgaaggtgatgggtcggcacaagcccgagaatatcgtcatcgagatggctcgcgagaatcagacgacccagaagggtcagaagaattctcgcgagcgcatgaagcgtatcgaggagggcattaaggagctgggcagtcagattctcaaggagcaccctgtcgagaacacgcagcttcagaacgagaagctgtatctttactacctccagaacggacgggacatgtacgtagatcaggagctggacatcaaccggctctctgactacgatgtggacgctatagtgcctcagagctttctgaaggacgatagcatcgacaacaaggtcctgactcgctccgataagaatcggggcaagtcggacaatgtcccgtccgaggaggtagtgaagaagatgaagaactattggcgtcagctgttgaacgcgaagctgatcactcagagaaagttcgataatctcaccaaggccgagagggggggtctgagcgagcttgataaggcgggtttcatcaagcggcagcttgttgagacccgccagatcacgaagcacgtcgctcagatcctcgactctcggatgaacaccaagtacgacgagaatgacaagcttattcgggaggtcaaggtcattacccttaagtcgaagctcgtcagcgactttcgcaaggattttcagttttataaagttcgtgagataaacaattatcaccatgcccacgacgcgtacctgaacgccgtcgtgggcacggcgctgataaagaagtacccgaagctggagtccgagttcgtttatggcgattataaggtgtacgacgtgcgcaagatgatcgccaagagcgagcaggagatcggaaaggctacggcgaagtacttcttttacagcaacatcatgaacttttttaagactgagatcacccttgcgaatggcgagatccgcaagcgcccgttgatcgagacgaacggggagactggggagattgtgtgggataagggtcgggatttcgctacggtgagaaaggttctttcgatgccccaggtcaacatcgtcaagaagacggaggttcagaccgggggcttctcgaaagaatctatcttaccgaagcgaaattccgacaagcttatcgcacgcaagaaggactgggaccccaagaagtacggggggttcgacagtcctacggtggcctactccgtgttggtggtcgccaaggttgagaagggcaagagcaagaagctcaagtccgtcaaggagctcttggggatcaccatcatggagaggtcatcgtttgagaagaatcctattgacttccttgaagccaagggctacaaggaagtcaagaaggatttgatcatcaagctccccaagtactccctgttcgagctcgagaacgggcgcaagcggatgctcgccagcgctggcgagcttcagaagggtaatgagcttgccctcccgagtaagtatgtcaatttcttgtacttggcgtcgcactacgagaagctgaagggctcgccggaggacaacgagcagaagcagcttttcgtagagcagcacaagcactaccttgatgagattatcgagcagatctctgagttcagcaagcgcgttatactagctgacgccaatctcgacaaggtgctctcggcttataacaagcaccgggataagccgatacgtgagcaggcggagaacatcatccacctgttcacgttgacgaacttgggggccccggcagcgttcaagtattttgatactacgatcgatcggaagcgttacaccagcaccaaggaggtcttggacgcgaccttgattcatcagtcgatcacgggtctttacgagactcgaattgacctttctcagcttggtggtgacagtggcggctcttcaggcggctccaagaggactgcggatggttctgaattcgaatcacctaagaagaagcggaaggtctccggggggtcgtccgggggctctatggacagcacgaaggagaagtgcgactcttataaggatgacctgcttctccggatggggctcaatgacaataaagccgggatggagggcctcgataaggagaagatcaacaagatcatcatggaggccactaaggggtcccggttttatggcaatgagctcaagaaggagaagcaggtcaaccagcgcatcgagaacatgatgcagcagaaggctcagataactagtcagcagctgcgcaaggcgcagctgcaggtggacagattcgccatggagctcgagcagtcgcgcaacttgagcaacacgattgtccacatcgacatggacgcgttctacgcggccgtggagatgcgggacaatcctgagctcaaggacaagccgattgctgtgggctccatgtcgatgctgtccacctctaactaccatgcccggaggttcggtgtccgcgctgctatgcccggctttatagcgaagcgcctctgtcctcagctaattatcgttcctccaaacttcgataagtacagggccgtgtccaaggaggtcaaggagattctggcggactacgacccgaatttcatggccatgtccttggacgaggcgtacctgaacattacgaagcatttggaggagcgacagaattggcctgaggacaagaggcgctactttataaagatgggcagcagcgtggagaacgataatccgggcaaggaagttaacaagttgtctgagcatgagaggagcatttctcctttgctgttcgaggagagcccctcggacgtgcagccccccggagacccgtttcaggtgaacttcgaagagcagaacaatccgcagatcctccagaacagcgtggtgttcggcacgagtgcccaggaggtggtcaaggagattcgttttcgcatcgagcagaagacgaccttgaccgcctccgcgggcatcgcgccgaacaccatgctggccaaggtttgttctgacaagaacaagcctaatggccagtaccagatcctcccaaaccgtcaagccgtgatggacttcatcaaggacctgccgattcggaaggtatctggtatcggtaaggttaccgagaagatgctgaaggccctgggcatcataacttgcacagagctctaccagcagcgagcgctcctcagcctgttgttctccgagacctcttggcactactttcttcacatctctctgggcctgggctcgacccacttgacccgagaccgagtgaggaagagtatgagtgtcgagaggaccttctcggagatcaacaaggctgaggagcagtactcgctgtgccaggagctctgtagcgagttagcccaggaccttcagaaggagcgcctgaagggccgcactgtcaccatcaagctgaagaatgtcaacttcgaggtgaagacccgggccagcactgttagttccgtggtgtccacggccgaggagatcttcgctatcgccaaggagcttcttaagacggagatcgacgcggactttccgcatccgcttcgcctccgccttatgggcgtccggatctcctcgtttcctaacgaggaggaccggaagcaccagcaaggcggaggctcaggcaagcggaccgctgacggctccggggggggctctccgaaaaagaagcggaaggtttgactagcaccagcctcaagaacacccgaatggagtctctaagctacataataccaacttacactttacaaaatgttgtcccccaaaatgtagccattcgtatctgctcctaataaaaagaaagtttcttcacattcttgtcagcccagaaccccacacgagttttgccactgctaagctgtgaggcagtgcaggctgggacagccgacctccaggttgcgaaaaacctggtctcgagaaaaaaaaaaaatggaaaaaaaaaaaacggaaaaaaaaaaaaggtaaaaaaaaaaaatataaaaaaaaaaaacataaaaaaaaaaaacgaaaaaaaaaaaacgtaaaaaaaaaaaactcaaaaaaaaaaaagataaaaaaaaaaaacctaaaaaaaaaaaatgtaaaaaaaaaaaagggaaaaaaaaaaaacgcaaaaaaaaaaaacacaaaaaaaaaaaatgcaaaaaaaaaaaatcgaaaaaaaaaaaatctaaaaaaaaaaaacgaaaaaaaaaaaacccaaaaaaaaaaaagacaaaaaaaaaaaatagaaaaaaaaaaagttaaaaaaaaaaaactgaaaaaaaaaaaatttaaaaaaaaaaaatctag

SEQ ID NO: 2642 - DNA, 6559 bp, synthetic construct
  misc_feature 1..6559: note = Synthetic
  source 1..6559: mol_type = other DNA
aggactcactatttgttttcgcgcccagttgcaaaaagtgtcgaaaaaaaaaaaaccaaaaaaaaaaaacaaaaaaaaaaaataattgactaaaagctcagaataaacgctcaactttggccggatctgccaccatgaagcggactgcggacgggtccgagttcgagtctccgaagaagaagcgcaaggtcgataagaagtactccatcggcctggacatcggaactaacagtgttggctgggccgtgatcactgatgagtacaaggtcccgtccaagaaattcaaggtgctgggtaacaccgatcgacatagtatcaagaagaacctgatcggggccctcttgttcgacagcggcgagactgctgaggcgacgcgcttgaagaggacggcccggcgtcgatacacccgacgcaagaatcggatttgctatctccaggagatcttctccaacgagatggcaaaggtggacgactcgttcttccaccgcctcgaggagagctttctcgtcgaggaggacaagaagcacgagcgccaccccatattcgggaatatcgtggatgaggtcgcctatcacgagaagtaccccacgatttatcatttgcgcaagaagctggtagattcaaccgacaaggcggacttgcggttgatctacctagctcttgcgcatatgataaagtttcgggggcacttcttgattgaaggcgacctcaatcccgataactcggatgtggacaagctcttcatacagctggtgcagacctacaaccagctgtttgaagagaatccgattaatgcgtcgggtgtcgacgccaaggccatcctcagcgcgcgcctcagcaagtctcgccgccttgagaatctgattgcccagctcccgggcgagaagaagaacgggttgttcggtaaccttattgcgctgtcgcttggcctcactccgaacttcaagtcgaacttcgacttggcggaggacgccaagctgcagctcagtaaggatacctacgacgacgacctggacaatcttctcgcccagatcggcgaccagtacgccgatctcttcctggcggcgaagaatctgagcgatgcaattctcctgagtgacattctgagggtgaatactgaaattacgaaggctccgctgtctgccagcatgatcaagcggtacgatgagcatcaccaggacctgacgctcctcaaggctctcgtccgtcagcagctcccggagaagtacaaggagatcttcttcgaccagtcgaagaacggatacgccgggtacatcgacgggggcgcttcccaggaggagttttataagtttataaagcccatcctggagaagatggacgggaccgaggagctcctggtgaagctcaaccgcgaggatctgctgcgcaagcagcggaccttcgataatggcagtattccccatcagattcacttaggagagttgcacgcgattcttcgccgccaggaagacttctaccccttcctcaaagataacagggagaagatcgagaagatcctcaccttccgcatcccgtattacgtgggtcccctggcgcgggggaactcacgttttgcgtggatgacgcggaagagtgaggagacgatcactccctggaactttgaggaagtggtagacaagggtgcttcggcacagtccttcatcgagcggatgacaaattttgacaagaatttgccgaacgagaaggtcttgccgaagcactcgctgctttacgagtactttacggtttacaacgagttgacgaaggtcaagtacgtcactgagggaatgcggaagcccgcattcctcagtggcgaacagaagaaggccatcgtcgacttgttgttcaagacgaaccgtaaagtaaccgtgaagcagctgaaggaggactacttcaagaagatcgagtgcttcgactccgttgagatcagcggagtcgaagaccgatttaatgcctccctcggtacgtatcatgatctcctcaagattatcaaggataaggacttccttgataatgaggagaatgaggatattctcgaggacattgtgctgaccctcaccctgttcgaagaccgtgagatgattgaggaacggttgaagacctacgctcatctgtttgatgacaaggtcatgaagcagttgaagcgtaggcgttataccggctggggtcgtctttcccgaaagcttatcaacgggatccgtgataagcagtcgggaaagacgatcctagacttcctcaagtctgacggttttgcgaacaggaacttcatgcagctcatccacgacgactccttgaccttcaaggaggatatccagaaggcgcaggtgagcggccagggcgatagcttgcacgagcatatcgcgaacctggccggctcacctgcgatcaagaagggtatcctccagacggtcaaggtcgtggatgagctcgtgaaggtgatgggtcggcacaagcccgagaatatcgtcatcgagatggctcgcgagaatcagacgacccagaagggtcagaagaattctcgcgagcgcatgaagcgtatcgaggagggcattaaggagctgggcagtcagattctcaaggagcaccctgtcgagaacacgcagcttcagaacgagaagctgtatctttactacctccagaacggacgggacatgtacgtagatcaggagctggacatcaaccggctctctgactacgatgtggacgctatagtgcctcagagctttctgaaggacgatagcatcgacaacaaggtcctgactcgctccgataagaatcggggcaagtcggacaatgtcccgtccgaggaggtagtgaagaagatgaagaactattggcgtcagctgttgaacgcgaagctgatcactcagagaaagttcgataatctcaccaaggccgagagggggggtctgagcgagcttgataaggcgggtttcatcaagcggcagcttgttgagacccgccagatcacgaagcacgtcgctcagatcctcgactctcggatgaacaccaagtacgacgagaatgacaagcttattcgggaggtcaaggtcattacccttaagtcgaagctcgtcagcgactttcgcaaggattttcagttttataaagttcgtgagataaacaattatcaccatgcccacgacgcgtacctgaacgccgtcgtgggcacggcgctgataaagaagtacccgaagctggagtccgagttcgtttatggcgattataaggtgtacgacgtgcgcaagatgatcgccaagagcgagcaggagatcggaaaggctacggcgaagtacttcttttacagcaacatcatgaacttttttaagactgagatcacccttgcgaatggcgagatccgcaagcgcccgttgatcgagacgaacggggagactggggagattgtgtgggataagggtcgggatttcgctacggtgagaaaggttctttcgatgccccaggtcaacatcgtcaagaagacggaggttcagaccgggggcttctcgaaagaatctatcttaccgaagcgaaattccgacaagcttatcgcacgcaagaaggactgggaccccaagaagtacggggggttcgacagtcctacggtggcctactccgtgttggtggtcgccaaggttgagaagggcaagagcaagaagctcaagtccgtcaaggagctcttggggatcaccatcatggagaggtcatcgtttgagaagaatcctattgacttccttgaagccaagggctacaaggaagtcaagaaggatttgatcatcaagctccccaagtactccctgttcgagctcgagaacgggcgcaagcggatgctcgccagcgctggcgagcttcagaagggtaatgagcttgccctcccgagtaagtatgtcaatttcttgtacttggcgtcgcactacgagaagctgaagggctcgccggaggacaacgagcagaagcagcttttcgtagagcagcacaagcactaccttgatgagattatcgagcagatctctgagttcagcaagcgcgttatactagctgacgccaatctcgacaaggtgctctcggcttataacaagcaccgggataagccgatacgtgagcaggcggagaacatcatccacctgttcacgttgacgaacttgggggccccggcagcgttcaagtattttgatactacgatcgatcggaagcgttacaccagcaccaaggaggtcttggacgcgaccttgattcatcagtcgatcacgggtctttacgagactcgaattgacctttctcagcttggtggtgacagtggcggctcttcaggcggctccaagaggactgcggatggttctgaattcgaatcacctaagaagaagcggaaggtctccggggggtcgtccgggggctctatggacagcacgaaggagaagtgcgactcttataaggatgacctgcttctccggatggggctcaatgacaataaagccgggatggagggcctcgataaggagaagatcaacaagatcatcatggaggccactaaggggtcccggttttatggcaatgagctcaagaaggagaagcaggtcaaccagcgcatcgagaacatgatgcagcagaaggctcagataactagtcagcagctgcgcaaggcgcagctgcaggtggacagattcgccatggagctcgagcagtcgcgcaacttgagcaacacgattgtccacatcgacatggacgcgttctacgcggccgtggagatgcgggacaatcctgagctcaaggacaagccgattgctgtgggctccatgtcgatgctgtccacctctaactaccatgcccggaggttcggtgtccgcgctgctatgcccggctttatagcgaagcgcctctgtcctcagctaattatcgttcctccaaacttcgataagtacagggccgtgtccaaggaggtcaaggagattctggcggactacgacccgaatttcatggccatgtccttggacgaggcgtacctgaacattacgaagcatttggaggagcgacagaattggcctgaggacaagaggcgctactttataaagatgggcagcagcgtggagaacgataatccgggcaaggaagttaacaagttgtctgagcatgagaggagcatttctcctttgctgttcgaggagagcccctcggacgtgcagccccccggagacccgtttcaggtgaacttcgaagagcagaacaatccgcagatcctccagaacagcgtggtgttcggcacgagtgcccaggaggtggtcaaggagattcgttttcgcatcgagcagaagacgaccttgaccgcctccgcgggcatcgcgccgaacaccatgctggccaaggtttgttctgacaagaacaagcctaatggccagtaccagatcctcccaaaccgtcaagccgtgatggacttcatcaaggacctgccgattcggaaggtatctggtatcggtaaggttaccgagaagatgctgaaggccctgggcatcataacttgcacagagctctaccagcagcgagcgctcctcagcctgttgttctccgagacctcttggcactactttcttcacatctctctgggcctgggctcgacccacttgacccgagaccgagtgaggaagagtatgagtgtcgagaggaccttctcggagatcaacaaggctgaggagcagtactcgctgtgccaggagctctgtagcgagttagcccaggaccttcagaaggagcgcctgaagggccgcactgtcaccatcaagctgaagaatgtcaacttcgaggtgaagacccgggccagcactgttagttccgtggtgtccacggccgaggagatcttcgctatcgccaaggagcttcttaagacggagatcgacgcggactttccgcatccgcttcgcctccgccttatgggcgtccggatctcctcgtttcctaacgaggaggaccggaagcaccagcaaggcggaggctcaggcaagcggaccgctgacggctccggggggggctctccgaaaaagaagcggaaggtttgactagcaccagcctcaagaacacccgaatggagtctctaagctacataataccaacttacactttacaaaatgttgtcccccaaaatgtagccattcgtatctgctcctaataaaaagaaagtttcttcacattctctcgagaaaaaaaaaaaatggaaaaaaaaaaaacggaaaaaaaaaaaaggtaaaaaaaaaaaatataaaaaaaaaaaacataaaaaaaaaaaacgaaaaaaaaaaaacgtaaaaaaaaaaaactcaaaaaaaaaaaagataaaaaaaaaaaacctaaaaaaaaaaaatgtaaaaaaaaaaaagggaaaaaaaaaaaacgcaaaaaaaaaaaacacaaaaaaaaaaaatgcaaaaaaaaaaaatcgaaaaaaaaaaaatctaaaaaaaaaaaacgaaaaaaaaaaaacccaaaaaaaaaaaagacaaaaaaaaaaaatagaaaaaaaaaaagttaaaaaaaaaaaactgaaaaaaaaaaaatttaaaaaaaaaaaatctag

SEQ ID NO: 2643 - DNA, 6508 bp, synthetic construct
  misc_feature 1..6508: note = Synthetic
  source 1..6508: mol_type = other DNA
aggtgttcaaccagagtgaaaccactaacgggtcagagccccaagctcagaataaacgctcaactttggccggatctgccaccatgaagcggactgcggacgggtccgagttcgagtctccgaagaagaagcgcaaggtcgataagaagtactccatcggcctggacatcggaactaacagtgttggctgggccgtgatcactgatgagtacaaggtcccgtccaagaaattcaaggtgctgggtaacaccgatcgacatagtatcaagaagaacctgatcggggccctcttgttcgacagcggcgagactgctgaggcgacgcgcttgaagaggacggcccggcgtcgatacacccgacgcaagaatcggatttgctatctccaggagatcttctccaacgagatggcaaaggtggacgactcgttcttccaccgcctcgaggagagctttctcgtcgaggaggacaagaagcacgagcgccaccccatattcgggaatatcgtggatgaggtcgcctatcacgagaagtaccccacgatttatcatttgcgcaagaagctggtagattcaaccgacaaggcggacttgcggttgatctacctagctcttgcgcatatgataaagtttcgggggcacttcttgattgaaggcgacctcaatcccgataactcggatgtggacaagctcttcatacagctggtgcagacctacaaccagctgtttgaagagaatccgattaatgcgtcgggtgtcgacgccaaggccatcctcagcgcgcgcctcagcaagtctcgccgccttgagaatctgattgcccagctcccgggcgagaagaagaacgggttgttcggtaaccttattgcgctgtcgcttggcctcactccgaacttcaagtcgaacttcgacttggcggaggacgccaagctgcagctcagtaaggatacctacgacgacgacctggacaatcttctcgcccagatcggcgaccagtacgccgatctcttcctggcggcgaagaatctgagcgatgcaattctcctgagtgacattctgagggtgaatactgaaattacgaaggctccgctgtctgccagcatgatcaagcggtacgatgagcatcaccaggacctgacgctcctcaaggctctcgtccgtcagcagctcccggagaagtacaaggagatcttcttcgaccagtcgaagaacggatacgccgggtacatcgacgggggcgcttcccaggaggagttttataagtttataaagcccatcctggagaagatggacgggaccgaggagctcctggtgaagctcaaccgcgaggatctgctgcgcaagcagcggaccttcgataatggcagtattccccatcagattcacttaggagagttgcacgcgattcttcgccgccaggaagacttctaccccttcctcaaagataacagggagaagatcgagaagatcctcaccttccgcatcccgtattacgtgggtcccctggcgcgggggaactcacgttttgcgtggatgacgcggaagagtgaggagacgatcactccctggaactttgaggaagtggtagacaagggtgcttcggcacagtccttcatcgagcggatgacaaattttgacaagaatttgccgaacgagaaggtcttgccgaagcactcgctgctttacgagtactttacggtttacaacgagttgacgaaggtcaagtacgtcactgagggaatgcggaagcccgcattcctcagtggcgaacagaagaaggccatcgtcgacttgttgttcaagacgaaccgtaaagtaaccgtgaagcagctgaaggaggactacttcaagaagatcgagtgcttcgactccgttgagatcagcggagtcgaagaccgatttaatgcctccctcggtacgtatcatgatctcctcaagattatcaaggataaggacttccttgataatgaggagaatgaggatattctcgaggacattgtgctgaccctcaccctgttcgaagaccgtgagatgattgaggaacggttgaagacctacgctcatctgtttgatgacaaggtcatgaagcagttgaagcgtaggcgttataccggctggggtcgtctttcccgaaagcttatcaacgggatccgtgataagcagtcgggaaagacgatcctagacttcctcaagtctgacggttttgcgaacaggaacttcatgcagctcatccacgacgactccttgaccttcaaggaggatatccagaaggcgcaggtgagcggccagggcgatagcttgcacgagcatatcgcgaacctggccggctcacctgcgatcaagaagggtatcctccagacggtcaaggtcgtggatgagctcgtgaaggtgatgggtcggcacaagcccgagaatatcgtcatcgagatggctcgcgagaatcagacgacccagaagggtcagaagaattctcgcgagcgcatgaagcgtatcgaggagggcattaaggagctgggcagtcagattctcaaggagcaccctgtcgagaacacgcagcttcagaacgagaagctgtatctttactacctccagaacggacgggacatgtacgtagatcaggagctggacatcaaccggctctctgactacgatgtggacgctatagtgcctcagagctttctgaaggacgatagcatcgacaacaaggtcctgactcgctccgataagaatcggggcaagtcggacaatgtcccgtccgaggaggtagtgaagaagatgaagaactattggcgtcagctgttgaacgcgaagctgatcactcagagaaagttcgataatctcaccaaggccgagagggggggtctgagcgagcttgataaggcgggtttcatcaagcggcagcttgttgagacccgccagatcacgaagcacgtcgctcagatcctcgactctcggatgaacaccaagtacgacgagaatgacaagcttattcgggaggtcaaggtcattacccttaagtcgaagctcgtcagcgactttcgcaaggattttcagttttataaagttcgtgagataaacaattatcaccatgcccacgacgcgtacctgaacgccgtcgtgggcacggcgctgataaagaagtacccgaagctggagtccgagttcgtttatggcgattataaggtgtacgacgtgcgcaagatgatcgccaagagcgagcaggagatcggaaaggctacggcgaagtacttcttttacagcaacatcatgaacttttttaagactgagatcacccttgcgaatggcgagatccgcaagcgcccgttgatcgagacgaacggggagactggggagattgtgtgggataagggtcgggatttcgctacggtgagaaaggttctttcgatgccccaggtcaacatcgtcaagaagacggaggttcagaccgggggcttctcgaaagaatctatcttaccgaagcgaaattccgacaagcttatcgcacgcaagaaggactgggaccccaagaagtacggggggttcgacagtcctacggtggcctactccgtgttggtggtcgccaaggttgagaagggcaagagcaagaagctcaagtccgtcaaggagctcttggggatcaccatcatggagaggtcatcgtttgagaagaatcctattgacttccttgaagccaagggctacaaggaagtcaagaaggatttgatcatcaagctccccaagtactccctgttcgagctcgagaacgggcgcaagcggatgctcgccagcgctggcgagcttcagaagggtaatgagcttgccctcccgagtaagtatgtcaatttcttgtacttggcgtcgcactacgagaagctgaagggctcgccggaggacaacgagcagaagcagcttttcgtagagcagcacaagcactaccttgatgagattatcgagcagatctctgagttcagcaagcgcgttatactagctgacgccaatctcgacaaggtgctctcggcttataacaagcaccgggataagccgatacgtgagcaggcggagaacatcatccacctgttcacgttgacgaacttgggggccccggcagcgttcaagtattttgatactacgatcgatcggaagcgttacaccagcaccaaggaggtcttggacgcgaccttgattcatcagtcgatcacgggtctttacgagactcgaattgacctttctcagcttggtggtgacagtggcggctcttcaggcggctccaagaggactgcggatggttctgaattcgaatcacctaagaagaagcggaaggtctccggggggtcgtccgggggctctatggacagcacgaaggagaagtgcgactcttataaggatgacctgcttctccggatggggctcaatgacaataaagccgggatggagggcctcgataaggagaagatcaacaagatcatcatggaggccactaaggggtcccggttttatggcaatgagctcaagaaggagaagcaggtcaaccagcgcatcgagaacatgatgcagcagaaggctcagataactagtcagcagctgcgcaaggcgcagctgcaggtggacagattcgccatggagctcgagcagtcgcgcaacttgagcaacacgattgtccacatcgacatggacgcgttctacgcggccgtggagatgcgggacaatcctgagctcaaggacaagccgattgctgtgggctccatgtcgatgctgtccacctctaactaccatgcccggaggttcggtgtccgcgctgctatgcccggctttatagcgaagcgcctctgtcctcagctaattatcgttcctccaaacttcgataagtacagggccgtgtccaaggaggtcaaggagattctggcggactacgacccgaatttcatggccatgtccttggacgaggcgtacctgaacattacgaagcatttggaggagcgacagaattggcctgaggacaagaggcgctactttataaagatgggcagcagcgtggagaacgataatccgggcaaggaagttaacaagttgtctgagcatgagaggagcatttctcctttgctgttcgaggagagcccctcggacgtgcagccccccggagacccgtttcaggtgaacttcgaagagcagaacaatccgcagatcctccagaacagcgtggtgttcggcacgagtgcccaggaggtggtcaaggagattcgttttcgcatcgagcagaagacgaccttgaccgcctccgcgggcatcgcgccgaacaccatgctggccaaggtttgttctgacaagaacaagcctaatggccagtaccagatcctcccaaaccgtcaagccgtgatggacttcatcaaggacctgccgattcggaaggtatctggtatcggtaaggttaccgagaagatgctgaaggccctgggcatcataacttgcacagagctctaccagcagcgagcgctcctcagcctgttgttctccgagacctcttggcactactttcttcacatctctctgggcctgggctcgacccacttgacccgagaccgagtgaggaagagtatgagtgtcgagaggaccttctcggagatcaacaaggctgaggagcagtactcgctgtgccaggagctctgtagcgagttagcccaggaccttcagaaggagcgcctgaagggccgcactgtcaccatcaagctgaagaatgtcaacttcgaggtgaagacccgggccagcactgttagttccgtggtgtccacggccgaggagatcttcgctatcgccaaggagcttcttaagacggagatcgacgcggactttccgcatccgcttcgcctccgccttatgggcgtccggatctcctcgtttcctaacgaggaggaccggaagcaccagcaaggcggaggctcaggcaagcggaccgctgacggctccggggggggctctccgaaaaagaagcggaaggtttgactagcaccagcctcaagaacacccgaatggagtctctaagctacataataccaacttacactttacaaaatgttgtcccccaaaatgtagccattcgtatctgctcctaataaaaagaaagtttcttcacattctctcgagaaaaaaaaaaaatggaaaaaaaaaaaacggaaaaaaaaaaaaggtaaaaaaaaaaaatataaaaaaaaaaaacataaaaaaaaaaaacgaaaaaaaaaaaacgtaaaaaaaaaaaactcaaaaaaaaaaaagataaaaaaaaaaaacctaaaaaaaaaaaatgtaaaaaaaaaaaagggaaaaaaaaaaaacgcaaaaaaaaaaaacacaaaaaaaaaaaatgcaaaaaaaaaaaatcgaaaaaaaaaaaatctaaaaaaaaaaaacgaaaaaaaaaaaacccaaaaaaaaaaaagacaaaaaaaaaaaatagaaaaaaaaaaagttaaaaaaaaaaaactgaaaaaaaaaaaatttaaaaaaaaaaaatctag

SEQ ID NO: 2644 - DNA, 6469 bp, synthetic construct
  misc_feature 1..6469: note = Synthetic
  source 1..6469: mol_type = other DNA
aggaagctcagaataaacgctcaactttggccggatctgccaccatgaagcggaccgccgacggctccgagttcgagtcccccaagaagaagcggaaggtggacaagaagtactccatcggcctggacatcggcaccaactccgtgggctgggccgtgatcaccgacgagtacaaggtgccctccaagaagttcaaggtgctgggcaacaccgaccggcactccatcaagaagaacctgatcggcgccctgctgttcgactccggcgagaccgccgaggccacccggctgaagcggaccgcccggcggcggtacacccggcggaagaaccggatctgctacctgcaggagatcttctccaacgagatggccaaggtggacgactccttcttccaccggctggaggagtccttcctggtggaggaggacaagaagcacgagcggcaccccatcttcggcaacatcgtggacgaggtggcctaccacgagaagtaccccaccatctaccacctgcggaagaagctggtggactccaccgacaaggccgacctgcggctgatctacctggccctggcccacatgatcaagttccggggccacttcctgatcgagggcgacctgaaccccgacaactccgacgtggacaagctgttcatccagctggtgcagacctacaaccagctgttcgaggagaaccccatcaacgcctccggcgtggacgccaaggccatcctgtccgcccggctgtccaagtcccggcggctggagaacctgatcgcccagctgcccggcgagaagaagaacggcctgttcggcaacctgatcgccctgtccctgggcctgacccccaacttcaagtccaacttcgacctggccgaggacgccaagctgcagctgtccaaggacacctacgacgacgacctggacaacctgctggcccagatcggcgaccagtacgccgacctgttcctggccgccaagaacctgtccgacgccatcctgctgtccgacatcctgcgggtgaacaccgagatcaccaaggcccccctgtccgcctccatgatcaagcggtacgacgagcaccaccaggacctgaccctgctgaaggccctggtgcggcagcagctgcccgagaagtacaaggagatcttcttcgaccagtccaagaacggctacgccggctacatcgacggcggcgcctcccaggaggagttctacaagttcatcaagcccatcctggagaagatggacggcaccgaggagctgctggtgaagctgaaccgggaggacctgctgcggaagcagcggaccttcgacaacggctccatcccccaccagatccacctgggcgagctgcacgccatcctgcggcggcaggaggacttctaccccttcctgaaggacaaccgggagaagatcgagaagatcctgaccttccggatcccctactacgtgggccccctggcccggggcaactcccggttcgcctggatgacccggaagtccgaggagaccatcaccccctggaacttcgaggaggtggtggacaagggcgcctccgcccagtccttcatcgagcggatgaccaacttcgacaagaacctgcccaacgagaaggtgctgcccaagcactccctgctgtacgagtacttcaccgtgtacaacgagctgaccaaggtgaagtacgtgaccgagggcatgcggaagcccgccttcctgtccggcgagcagaagaaggccatcgtggacctgctgttcaagaccaaccggaaggtgaccgtgaagcagctgaaggaggactacttcaagaagatcgagtgcttcgactccgtggagatctccggcgtggaggaccggttcaacgcctccctgggcacctaccacgacctgctgaagatcatcaaggacaaggacttcctggacaacgaggagaacgaggacatcctggaggacatcgtgctgaccctgaccctgttcgaggaccgggagatgatcgaggagcggctgaagacctacgcccacctgttcgacgacaaggtgatgaagcagctgaagcggcggcggtacaccggctggggccggctgtcccggaagctgatcaacggcatccgggacaagcagtccggcaagaccatcctggacttcctgaagtccgacggcttcgccaaccggaacttcatgcagctgatccacgacgactccctgaccttcaaggaggacatccagaaggcccaggtgtccggccagggcgactccctgcacgagcacatcgccaacctggccggctcccccgccatcaagaagggcatcctgcagaccgtgaaggtggtggacgagctggtgaaggtgatgggccggcacaagcccgagaacatcgtgatcgagatggcccgggagaaccagaccacccagaagggccagaagaactcccgggagcggatgaagcggatcgaggagggcatcaaggagctgggctcccagatcctgaaggagcaccccgtggagaacacccagctgcagaacgagaagctgtacctgtactacctgcagaacggccgggacatgtacgtggaccaggagctggacatcaaccggctgtccgactacgacgtggactccatcgtgccccagtccttcctgaaggacgactccatcgacaacaaggtgctgacccggtccgacaagaaccggggcaagtccgacaacgtgccctccgaggaggtggtgaagaagatgaagaactactggcggcagctgctgaacgccaagctgatcacccagcggaagttcgacaacctgaccaaggccgagcggggcggcctgtccgagctggacaaggccggcttcatcaagcggcagctggtggagacccggcagatcaccaagcacgtggcccagatcctggactcccggatgaacaccaagtacgacgagaacgacaagctgatccgggaggtgaaggtgatcaccctgaagtccaagctggtgtccgacttccggaaggacttccagttctacaaggtgcgggagatcaacaactaccaccacgcccacgacgcctacctgaacgccgtggtgggcaccgccctgatcaagaagtaccccaagctggagtccgagttcgtgtacggcgactacaaggtgtacgacgtgcggaagatgatcgccaagtccgagcaggagatcggcaaggccaccgccaagtacttcttctactccaacatcatgaacttcttcaagaccgagatcaccctggccaacggcgagatccggaagcggcccctgatcgagaccaacggcgagaccggcgagatcgtgtgggacaagggccgggacttcgccaccgtgcggaaggtgctgtccatgccccaggtgaacatcgtgaagaagaccgaggtgcagaccggcggcttctccaaggagtccatcctgcccaagcggaactccgacaagctgatcgcccggaagaaggactgggaccccaagaagtacggcggcttcgactcccccaccgtggcctactccgtgctggtggtggccaaggtggagaagggcaagtccaagaagctgaagtccgtgaaggagctgctgggcatcaccatcatggagcggtcctccttcgagaagaaccccatcgacttcctggaggccaagggctacaaggaggtgaagaaggacctgatcatcaagctgcccaagtactccctgttcgagctggagaacggccggaagcggatgctggcctccgccggcgagctgcagaagggcaacgagctggccctgccctccaagtacgtgaacttcctgtacctggcctcccactacgagaagctgaagggctcccccgaggacaacgagcagaagcagctgttcgtggagcagcacaagcactacctggacgagatcatcgagcagatctccgagttctccaagcgggtgatcctggccgacgccaacctggacaaggtgctgtccgcctacaacaagcaccgggacaagcccatccgggagcaggccgagaacatcatccacctgttcaccctgaccaacctgggcgcccccgccgccttcaagtacttcgacaccaccatcgaccggaagcggtacacctccaccaaggaggtgctggacgccaccctgatccaccagtccatcaccggcctgtacgagacccggatcgacctgtcccagctgggcggcgactccggcggctcctccggcggctccaagcggaccgccgacggctccgagttcgagtcccccaagaagaagcggaaggtgtccggcggctcctccggcggctccatggactccaccaaggagaagtgcgactcctacaaggacgacctgctgctgcggatgggcctgaacgacaacaaggccggcatggagggcctggacaaggagaagatcaacaagatcatcatggaggccaccaagggctcccggttctacggcaacgagctgaagaaggagaagcaggtgaaccagcggatcgagaacatgatgcagcagaaggcccagatcacctcccagcagctgcggaaggcccagctgcaggtggaccggttcgccatggagctggagcagtcccggaacctgtccaacaccatcgtgcacatcgacatggacgccttctacgccgccgtggagatgcgggacaaccccgagctgaaggacaagcccatcgccgtgggctccatgtccatgctgtccacctccaactaccacgcccggcggttcggcgtgcgggccgccatgcccggcttcatcgccaagcggctgtgcccccagctgatcatcgtgccccccaacttcgacaagtaccgggccgtgtccaaggaggtgaaggagatcctggccgactacgaccccaacttcatggccatgtccctggacgaggcctacctgaacatcaccaagcacctggaggagcggcagaactggcccgaggacaagcggcggtacttcatcaagatgggctcctccgtggagaacgacaaccccggcaaggaggtgaacaagctgtccgagcacgagcggtccatctcccccctgctgttcgaggagtccccctccgacgtgcagccccccggcgaccccttccaggtgaacttcgaggagcagaacaacccccagatcctgcagaactccgtggtgttcggcacctccgcccaggaggtggtgaaggagatccggttccggatcgagcagaagaccaccctgaccgcctccgccggcatcgcccccaacaccatgctggccaaggtgtgctccgacaagaacaagcccaacggccagtaccagatcctgcccaaccggcaggccgtgatggacttcatcaaggacctgcccatccggaaggtgtccggcatcggcaaggtgaccgagaagatgctgaaggccctgggcatcatcacctgcaccgagctgtaccagcagcgggccctgctgtccctgctgttctccgagacctcctggcactacttcctgcacatctccctgggcctgggctccacccacctgacccgggaccgggtgcggaagtccatgtccgtggagcggaccttctccgagatcaacaaggccgaggagcagtactccctgtgccaggagctgtgctccgagctggcccaggacctgcagaaggagcggctgaagggccggaccgtgaccatcaagctgaagaacgtgaacttcgaggtgaagacccgggcctccaccgtgtcctccgtggtgtccaccgccgaggagatcttcgccatcgccaaggagctgctgaagaccgagatcgacgccgacttcccccaccccctgcggctgcggctgatgggcgtgcggatctcctccttccccaacgaggaggaccggaagcaccagcagggcggcggctccggcaagcggaccgccgacggctccggcggcggctcccccaagaagaagcggaaggtgtagctagcaccagcctcaagaacacccgaatggagtctctaagctacataataccaacttacactttacaaaatgttgtcccccaaaatgtagccattcgtatctgctcctaataaaaagaaagtttcttcacattctctcgagaaaaaaaaaaaatggaaaaaaaaaaaacggaaaaaaaaaaaaggtaaaaaaaaaaaatataaaaaaaaaaaacataaaaaaaaaaaacgaaaaaaaaaaaacgtaaaaaaaaaaaactcaaaaaaaaaaaagataaaaaaaaaaaacctaaaaaaaaaaaatgtaaaaaaaaaaaagggaaaaaaaaaaaacgcaaaaaaaaaaaacacaaaaaaaaaaaatgcaaaaaaaaaaaatcgaaaaaaaaaaaatctaaaaaaaaaaaacgaaaaaaaaaaaacccaaaaaaaaaaaagacaaaaaaaaaaaatagaaaaaaaaaaagttaaaaaaaaaaaactgaaaaaaaaaaaatttaaaaaaaaaaaatctag

SEQ ID NO: 2645 - DNA, 6559 bp, synthetic construct
  misc_feature 1..6559: note = Synthetic
  source 1..6559: mol_type = other DNA
aggactcactatttgttttcgcgcccagttgcaaaaagtgtcgaaaaaaaaaaaaccaaaaaaaaaaaacaaaaaaaaaaaataattgactaaaagctcagaataaacgctcaactttggccggatctgccaccatgaagcggaccgccgacggctccgagttcgagtcccccaagaagaagcggaaggtggacaagaagtactccatcggcctggacatcggcaccaactccgtgggctgggccgtgatcaccgacgagtacaaggtgccctccaagaagttcaaggtgctgggcaacaccgaccggcactccatcaagaagaacctgatcggcgccctgctgttcgactccggcgagaccgccgaggccacccggctgaagcggaccgcccggcggcggtacacccggcggaagaaccggatctgctacctgcaggagatcttctccaacgagatggccaaggtggacgactccttcttccaccggctggaggagtccttcctggtggaggaggacaagaagcacgagcggcaccccatcttcggcaacatcgtggacgaggtggcctaccacgagaagtaccccaccatctaccacctgcggaagaagctggtggactccaccgacaaggccgacctgcggctgatctacctggccctggcccacatgatcaagttccggggccacttcctgatcgagggcgacctgaaccccgacaactccgacgtggacaagctgttcatccagctggtgcagacctacaaccagctgttcgaggagaaccccatcaacgcctccggcgtggacgccaaggccatcctgtccgcccggctgtccaagtcccggcggctggagaacctgatcgcccagctgcccggcgagaagaagaacggcctgttcggcaacctgatcgccctgtccctgggcctgacccccaacttcaagtccaacttcgacctggccgaggacgccaagctgcagctgtccaaggacacctacgacgacgacctggacaacctgctggcccagatcggcgaccagtacgccgacctgttcctggccgccaagaacctgtccgacgccatcctgctgtccgacatcctgcgggtgaacaccgagatcaccaaggcccccctgtccgcctccatgatcaagcggtacgacgagcaccaccaggacctgaccctgctgaaggccctggtgcggcagcagctgcccgagaagtacaaggagatcttcttcgaccagtccaagaacggctacgccggctacatcgacggcggcgcctcccaggaggagttctacaagttcatcaagcccatcctggagaagatggacggcaccgaggagctgctggtgaagctgaaccgggaggacctgctgcggaagcagcggaccttcgacaacggctccatcccccaccagatccacctgggcgagctgcacgccatcctgcggcggcaggaggacttctaccccttcctgaaggacaaccgggagaagatcgagaagatcctgaccttccggatcccctactacgtgggccccctggcccggggcaactcccggttcgcctggatgacccggaagtccgaggagaccatcaccccctggaacttcgaggaggtggtggacaagggcgcctccgcccagtccttcatcgagcggatgaccaacttcgacaagaacctgcccaacgagaaggtgctgcccaagcactccctgctgtacgagtacttcaccgtgtacaacgagctgaccaaggtgaagtacgtgaccgagggcatgcggaagcccgccttcctgtccggcgagcagaagaaggccatcgtggacctgctgttcaagaccaaccggaaggtgaccgtgaagcagctgaaggaggactacttcaagaagatcgagtgcttcgactccgtggagatctccggcgtggaggaccggttcaacgcctccctgggcacctaccacgacctgctgaagatcatcaaggacaaggacttcctggacaacgaggagaacgaggacatcctggaggacatcgtgctgaccctgaccctgttcgaggaccgggagatgatcgaggagcggctgaagacctacgcccacctgttcgacgacaaggtgatgaagcagctgaagcggcggcggtacaccggctggggccggctgtcccggaagctgatcaacggcatccgggacaagcagtccggcaagaccatcctggacttcctgaagtccgacggcttcgccaaccggaacttcatgcagctgatccacgacgactccctgaccttcaaggaggacatccagaaggcccaggtgtccggccagggcgactccctgcacgagcacatcgccaacctggccggctcccccgccatcaagaagggcatcctgcagaccgtgaaggtggtggacgagctggtgaaggtgatgggccggcacaagcccgagaacatcgtgatcgagatggcccgggagaaccagaccacccagaagggccagaagaactcccgggagcggatgaagcggatcgaggagggcatcaaggagctgggctcccagatcctgaaggagcaccccgtggagaacacccagctgcagaacgagaagctgtacctgtactacctgcagaacggccgggacatgtacgtggaccaggagctggacatcaaccggctgtccgactacgacgtggactccatcgtgccccagtccttcctgaaggacgactccatcgacaacaaggtgctgacccggtccgacaagaaccggggcaagtccgacaacgtgccctccgaggaggtggtgaagaagatgaagaactactggcggcagctgctgaacgccaagctgatcacccagcggaagttcgacaacctgaccaaggccgagcggggcggcctgtccgagctggacaaggccggcttcatcaagcggcagctggtggagacccggcagatcaccaagcacgtggcccagatcctggactcccggatgaacaccaagtacgacgagaacgacaagctgatccgggaggtgaaggtgatcaccctgaagtccaagctggtgtccgacttccggaaggacttccagttctacaaggtgcgggagatcaacaactaccaccacgcccacgacgcctacctgaacgccgtggtgggcaccgccctgatcaagaagtaccccaagctggagtccgagttcgtgtacggcgactacaaggtgtacgacgtgcggaagatgatcgccaagtccgagcaggagatcggcaaggccaccgccaagtacttcttctactccaacatcatgaacttcttcaagaccgagatcaccctggccaacggcgagatccggaagcggcccctgatcgagaccaacggcgagaccggcgagatcgtgtgggacaagggccgggacttcgccaccgtgcggaaggtgctgtccatgccccaggtgaacatcgtgaagaagaccgaggtgcagaccggcggcttctccaaggagtccatcctgcccaagcggaactccgacaagctgatcgcccggaagaaggactgggaccccaagaagtacggcggcttcgactcccccaccgtggcctactccgtgctggtggtggccaaggtggagaagggcaagtccaagaagctgaagtccgtgaaggagctgctgggcatcaccatcatggagcggtcctccttcgagaagaaccccatcgacttcctggaggccaagggctacaaggaggtgaagaaggacctgatcatcaagctgcccaagtactccctgttcgagctggagaacggccggaagcggatgctggcctccgccggcgagctgcagaagggcaacgagctggccctgccctccaagtacgtgaacttcctgtacctggcctcccactacgagaagctgaagggctcccccgaggacaacgagcagaagcagctgttcgtggagcagcacaagcactacctggacgagatcatcgagcagatctccgagttctccaagcgggtgatcctggccgacgccaacctggacaaggtgctgtccgcctacaacaagcaccgggacaagcccatccgggagcaggccgagaacatcatccacctgttcaccctgaccaacctgggcgcccccgccgccttcaagtacttcgacaccaccatcgaccggaagcggtacacctccaccaaggaggtgctggacgccaccctgatccaccagtccatcaccggcctgtacgagacccggatcgacctgtcccagctgggcggcgactccggcggctcctccggcggctccaagcggaccgccgacggctccgagttcgagtcccccaagaagaagcggaaggtgtccggcggctcctccggcggctccatggactccaccaaggagaagtgcgactcctacaaggacgacctgctgctgcggatgggcctgaacgacaacaaggccggcatggagggcctggacaaggagaagatcaacaagatcatcatggaggccaccaagggctcccggttctacggcaacgagctgaagaaggagaagcaggtgaaccagcggatcgagaacatgatgcagcagaaggcccagatcacctcccagcagctgcggaaggcccagctgcaggtggaccggttcgccatggagctggagcagtcccggaacctgtccaacaccatcgtgcacatcgacatggacgccttctacgccgccgtggagatgcgggacaaccccgagctgaaggacaagcccatcgccgtgggctccatgtccatgctgtccacctccaactaccacgcccggcggttcggcgtgcgggccgccatgcccggcttcatcgccaagcggctgtgcccccagctgatcatcgtgccccccaacttcgacaagtaccgggccgtgtccaaggaggtgaaggagatcctggccgactacgaccccaacttcatggccatgtccctggacgaggcctacctgaacatcaccaagcacctggaggagcggcagaactggcccgaggacaagcggcggtacttcatcaagatgggctcctccgtggagaacgacaaccccggcaaggaggtgaacaagctgtccgagcacgagcggtccatctcccccctgctgttcgaggagtccccctccgacgtgcagccccccggcgaccccttccaggtgaacttcgaggagcagaacaacccccagatcctgcagaactccgtggtgttcggcacctccgcccaggaggtggtgaaggagatccggttccggatcgagcagaagaccaccctgaccgcctccgccggcatcgcccccaacaccatgctggccaaggtgtgctccgacaagaacaagcccaacggccagtaccagatcctgcccaaccggcaggccgtgatggacttcatcaaggacctgcccatccggaaggtgtccggcatcggcaaggtgaccgagaagatgctgaaggccctgggcatcatcacctgcaccgagctgtaccagcagcgggccctgctgtccctgctgttctccgagacctcctggcactacttcctgcacatctccctgggcctgggctccacccacctgacccgggaccgggtgcggaagtccatgtccgtggagcggaccttctccgagatcaacaaggccgaggagcagtactccctgtgccaggagctgtgctccgagctggcccaggacctgcagaaggagcggctgaagggccggaccgtgaccatcaagctgaagaacgtgaacttcgaggtgaagacccgggcctccaccgtgtcctccgtggtgtccaccgccgaggagatcttcgccatcgccaaggagctgctgaagaccgagatcgacgccgacttcccccaccccctgcggctgcggctgatgggcgtgcggatctcctccttccccaacgaggaggaccggaagcaccagcagggcggcggctccggcaagcggaccgccgacggctccggcggcggctcccccaagaagaagcggaaggtgtagctagcaccagcctcaagaacacccgaatggagtctctaagctacataataccaacttacactttacaaaatgttgtcccccaaaatgtagccattcgtatctgctcctaataaaaagaaagtttcttcacattctctcgagaaaaaaaaaaaatggaaaaaaaaaaaacggaaaaaaaaaaaaggtaaaaaaaaaaaatataaaaaaaaaaaacataaaaaaaaaaaacgaaaaaaaaaaaacgtaaaaaaaaaaaactcaaaaaaaaaaaagataaaaaaaaaaaacctaaaaaaaaaaaatgtaaaaaaaaaaaagggaaaaaaaaaaaacgcaaaaaaaaaaaacacaaaaaaaaaaaatgcaaaaaaaaaaaatcgaaaaaaaaaaaatctaaaaaaaaaaaacgaaaaaaaaaaaacccaaaaaaaaaaaagacaaaaaaaaaaaatagaaaaaaaaaaagttaaaaaaaaaaaactgaaaaaaaaaaaatttaaaaaaaaaaaatctag

SEQ ID NO: 2646 - DNA, 6469 bp, synthetic construct
  misc_feature 1..6469: note = Synthetic
  source 1..6469: mol_type = other DNA
aggaagctcagaataaacgctcaactttggccggatctgccaccatgaagcggactgcggacgggtccgagttcgagtctccgaagaagaagcgcaaggtcgataagaagtactccatcggcctggacatcggaactaacagtgttggctgggccgtgatcactgatgagtacaaggtcccgtccaagaaattcaaggtgctgggtaacaccgatcgacatagtatcaagaagaacctgatcggggccctcttgttcgacagcggcgagactgctgaggcgacgcgcttgaagaggacggcccggcgtcgatacacccgacgcaagaatcggatttgctatctccaggagatcttctccaacgagatggcaaaggtggacgactcgttcttccaccgcctcgaggagagctttctcgtcgaggaggacaagaagcacgagcgccaccccatattcgggaatatcgtggatgaggtcgcctatcacgagaagtaccccacgatttatcatttgcgcaagaagctggtagattcaaccgacaaggcggacttgcggttgatctacctagctcttgcgcatatgataaagtttcgggggcacttcttgattgaaggcgacctcaatcccgataactcggatgtggacaagctcttcatacagctggtgcagacctacaaccagctgtttgaagagaatccgattaatgcgtcgggtgtcgacgccaaggccatcctcagcgcgcgcctcagcaagtctcgccgccttgagaatctgattgcccagctcccgggcgagaagaagaacgggttgttcggtaaccttattgcgctgtcgcttggcctcactccgaacttcaagtcgaacttcgacttggcggaggacgccaagctgcagctcagtaaggatacctacgacgacgacctggacaatcttctcgcccagatcggcgaccagtacgccgatctcttcctggcggcgaagaatctgagcgatgcaattctcctgagtgacattctgagggtgaatactgaaattacgaaggctccgctgtctgccagcatgatcaagcggtacgatgagcatcaccaggacctgacgctcctcaaggctctcgtccgtcagcagctcccggagaagtacaaggagatcttcttcgaccagtcgaagaacggatacgccgggtacatcgacgggggcgcttcccaggaggagttttataagtttataaagcccatcctggagaagatggacgggaccgaggagctcctggtgaagctcaaccgcgaggatctgctgcgcaagcagcggaccttcgataatggcagtattccccatcagattcacttaggagagttgcacgcgattcttcgccgccaggaagacttctaccccttcctcaaagataacagggagaagatcgagaagatcctcaccttccgcatcccgtattacgtgggtcccctggcgcgggggaactcacgttttgcgtggatgacgcggaagagtgaggagacgatcactccctggaactttgaggaagtggtagacaagggtgcttcggcacagtccttcatcgagcggatgacaaattttgacaagaatttgccgaacgagaaggtcttgccgaagcactcgctgctttacgagtactttacggtttacaacgagttgacgaaggtcaagtacgtcactgagggaatgcggaagcccgcattcctcagtggcgaacagaagaaggccatcgtcgacttgttgttcaagacgaaccgtaaagtaaccgtgaagcagctgaaggaggactacttcaagaagatcgagtgcttcgactccgttgagatcagcggagtcgaagaccgatttaatgcctccctcggtacgtatcatgatctcctcaagattatcaaggataaggacttccttgataatgaggagaatgaggatattctcgaggacattgtgctgaccctcaccctgttcgaagaccgtgagatgattgaggaacggttgaagacctacgctcatctgtttgatgacaaggtcatgaagcagttgaagcgtaggcgttataccggctggggtcgtctttcccgaaagcttatcaacgggatccgtgataagcagtcgggaaagacgatcctagacttcctcaagtctgacggttttgcgaacaggaacttcatgcagctcatccacgacgactccttgaccttcaaggaggatatccagaaggcgcaggtgagcggccagggcgatagcttgcacgagcatatcgcgaacctggccggctcacctgcgatcaagaagggtatcctccagacggtcaaggtcgtggatgagctcgtgaaggtgatgggtcggcacaagcccgagaatatcgtcatcgagatggctcgcgagaatcagacgacccagaagggtcagaagaattctcgcgagcgcatgaagcgtatcgaggagggcattaaggagctgggcagtcagattctcaaggagcaccctgtcgagaacacgcagcttcagaacgagaagctgtatctttactacctccagaacggacgggacatgtacgtagatcaggagctggacatcaaccggctctctgactacgatgtggactctatagtgcctcagagctttctgaaggacgatagcatcgacaacaaggtcctgactcgctccgataagaatcggggcaagtcggacaatgtcccgtccgaggaggtagtgaagaagatgaagaactattggcgtcagctgttgaacgcgaagctgatcactcagagaaagttcgataatctcaccaaggccgagagggggggtctgagcgagcttgataaggcgggtttcatcaagcggcagcttgttgagacccgccagatcacgaagcacgtcgctcagatcctcgactctcggatgaacaccaagtacgacgagaatgacaagcttattcgggaggtcaaggtcattacccttaagtcgaagctcgtcagcgactttcgcaaggattttcagttttataaagttcgtgagataaacaattatcaccatgcccacgacgcgtacctgaacgccgtcgtgggcacggcgctgataaagaagtacccgaagctggagtccgagttcgtttatggcgattataaggtgtacgacgtgcgcaagatgatcgccaagagcgagcaggagatcggaaaggctacggcgaagtacttcttttacagcaacatcatgaacttttttaagactgagatcacccttgcgaatggcgagatccgcaagcgcccgttgatcgagacgaacggggagactggggagattgtgtgggataagggtcgggatttcgctacggtgagaaaggttctttcgatgccccaggtcaacatcgtcaagaagacggaggttcagaccgggggcttctcgaaagaatctatcttaccgaagcgaaattccgacaagcttatcgcacgcaagaaggactgggaccccaagaagtacggggggttcgacagtcctacggtggcctactccgtgttggtggtcgccaaggttgagaagggcaagagcaagaagctcaagtccgtcaaggagctcttggggatcaccatcatggagaggtcatcgtttgagaagaatcctattgacttccttgaagccaagggctacaaggaagtcaagaaggatttgatcatcaagctccccaagtactccctgttcgagctcgagaacgggcgcaagcggatgctcgccagcgctggcgagcttcagaagggtaatgagcttgccctcccgagtaagtatgtcaatttcttgtacttggcgtcgcactacgagaagctgaagggctcgccggaggacaacgagcagaagcagcttttcgtagagcagcacaagcactaccttgatgagattatcgagcagatctctgagttcagcaagcgcgttatactagctgacgccaatctcgacaaggtgctctcggcttataacaagcaccgggataagccgatacgtgagcaggcggagaacatcatccacctgttcacgttgacgaacttgggggccccggcagcgttcaagtattttgatactacgatcgatcggaagcgttacaccagcaccaaggaggtcttggacgcgaccttgattcatcagtcgatcacgggtctttacgagactcgaattgacctttctcagcttggtggtgacagtggcggctcttcaggcggctccaagaggactgcggatggttctgaattcgaatcacctaagaagaagcggaaggtctccggggggtcgtccgggggctctatggacagcacgaaggagaagtgcgactcttataaggatgacctgcttctccggatggggctcaatgacaataaagccgggatggagggcctcgataaggagaagatcaacaagatcatcatggaggccactaaggggtcccggttttatggcaatgagctcaagaaggagaagcaggtcaaccagcgcatcgagaacatgatgcagcagaaggctcagataactagtcagcagctgcgcaaggcgcagctgcaggtggacagattcgccatggagctcgagcagtcgcgcaacttgagcaacacgattgtccacatcgacatggacgcgttctacgcggccgtggagatgcgggacaatcctgagctcaaggacaagccgattgctgtgggctccatgtcgatgctgtccacctctaactaccatgcccggaggttcggtgtccgcgctgctatgcccggctttatagcgaagcgcctctgtcctcagctaattatcgttcctccaaacttcgataagtacagggccgtgtccaaggaggtcaaggagattctggcggactacgacccgaatttcatggccatgtccttggacgaggcgtacctgaacattacgaagcatttggaggagcgacagaattggcctgaggacaagaggcgctactttataaagatgggcagcagcgtggagaacgataatccgggcaaggaagttaacaagttgtctgagcatgagaggagcatttctcctttgctgttcgaggagagcccctcggacgtgcagccccccggagacccgtttcaggtgaacttcgaagagcagaacaatccgcagatcctccagaacagcgtggtgttcggcacgagtgcccaggaggtggtcaaggagattcgttttcgcatcgagcagaagacgaccttgaccgcctccgcgggcatcgcgccgaacaccatgctggccaaggtttgttctgacaagaacaagcctaatggccagtaccagatcctcccaaaccgtcaagccgtgatggacttcatcaaggacctgccgattcggaaggtatctggtatcggtaaggttaccgagaagatgctgaaggccctgggcatcataacttgcacagagctctaccagcagcgagcgctcctcagcctgttgttctccgagacctcttggcactactttcttcacatctctctgggcctgggctcgacccacttgacccgagaccgagtgaggaagagtatgagtgtcgagaggaccttctcggagatcaacaaggctgaggagcagtactcgctgtgccaggagctctgtagcgagttagcccaggaccttcagaaggagcgcctgaagggccgcactgtcaccatcaagctgaagaatgtcaacttcgaggtgaagacccgggccagcactgttagttccgtggtgtccacggccgaggagatcttcgctatcgccaaggagcttcttaagacggagatcgacgcggactttccgcatccgcttcgcctccgccttatgggcgtccggatctcctcgtttcctaacgaggaggaccggaagcaccagcaaggcggaggctcaggcaagcggaccgctgacggctccggggggggctctccgaaaaagaagcggaaggtttgactagcaccagcctcaagaacacccgaatggagtctctaagctacataataccaacttacactttacaaaatgttgtcccccaaaatgtagccattcgtatctgctcctaataaaaagaaagtttcttcacattctctcgagaaaaaaaaaaaatggaaaaaaaaaaaacggaaaaaaaaaaaaggtaaaaaaaaaaaatataaaaaaaaaaaacataaaaaaaaaaaacgaaaaaaaaaaaacgtaaaaaaaaaaaactcaaaaaaaaaaaagataaaaaaaaaaaacctaaaaaaaaaaaatgtaaaaaaaaaaaagggaaaaaaaaaaaacgcaaaaaaaaaaaacacaaaaaaaaaaaatgcaaaaaaaaaaaatcgaaaaaaaaaaaatctaaaaaaaaaaaacgaaaaaaaaaaaacccaaaaaaaaaaaagacaaaaaaaaaaaatagaaaaaaaaaaagttaaaaaaaaaaaactgaaaaaaaaaaaatttaaaaaaaaaaaatctag

SEQ ID NO: 2647 - DNA, 6559 bp, synthetic construct
  misc_feature 1..6559: note = Synthetic
  source 1..6559: mol_type = other DNA
aggactcactatttgttttcgcgcccagttgcaaaaagtgtcgaaaaaaaaaaaaccaaaaaaaaaaaacaaaaaaaaaaaataattgactaaaagctcagaataaacgctcaactttggccggatctgccaccatgaagcggactgcggacgggtccgagttcgagtctccgaagaagaagcgcaaggtcgataagaagtactccatcggcctggacatcggaactaacagtgttggctgggccgtgatcactgatgagtacaaggtcccgtccaagaaattcaaggtgctgggtaacaccgatcgacatagtatcaagaagaacctgatcggggccctcttgttcgacagcggcgagactgctgaggcgacgcgcttgaagaggacggcccggcgtcgatacacccgacgcaagaatcggatttgctatctccaggagatcttctccaacgagatggcaaaggtggacgactcgttcttccaccgcctcgaggagagctttctcgtcgaggaggacaagaagcacgagcgccaccccatattcgggaatatcgtggatgaggtcgcctatcacgagaagtaccccacgatttatcatttgcgcaagaagctggtagattcaaccgacaaggcggacttgcggttgatctacctagctcttgcgcatatgataaagtttcgggggcacttcttgattgaaggcgacctcaatcccgataactcggatgtggacaagctcttcatacagctggtgcagacctacaaccagctgtttgaagagaatccgattaatgcgtcgggtgtcgacgccaaggccatcctcagcgcgcgcctcagcaagtctcgccgccttgagaatctgattgcccagctcccgggcgagaagaagaacgggttgttcggtaaccttattgcgctgtcgcttggcctcactccgaacttcaagtcgaacttcgacttggcggaggacgccaagctgcagctcagtaaggatacctacgacgacgacctggacaatcttctcgcccagatcggcgaccagtacgccgatctcttcctggcggcgaagaatctgagcgatgcaattctcctgagtgacattctgagggtgaatactgaaattacgaaggctccgctgtctgccagcatgatcaagcggtacgatgagcatcaccaggacctgacgctcctcaaggctctcgtccgtcagcagctcccggagaagtacaaggagatcttcttcgaccagtcgaagaacggatacgccgggtacatcgacgggggcgcttcccaggaggagttttataagtttataaagcccatcctggagaagatggacgggaccgaggagctcctggtgaagctcaaccgcgaggatctgctgcgcaagcagcggaccttcgataatggcagtattccccatcagattcacttaggagagttgcacgcgattcttcgccgccaggaagacttctaccccttcctcaaagataacagggagaagatcgagaagatcctcaccttccgcatcccgtattacgtgggtcccctggcgcgggggaactcacgttttgcgtggatgacgcggaagagtgaggagacgatcactccctggaactttgaggaagtggtagacaagggtgcttcggcacagtccttcatcgagcggatgacaaattttgacaagaatttgccgaacgagaaggtcttgccgaagcactcgctgctttacgagtactttacggtttacaacgagttgacgaaggtcaagtacgtcactgagggaatgcggaagcccgcattcctcagtggcgaacagaagaaggccatcgtcgacttgttgttcaagacgaaccgtaaagtaaccgtgaagcagctgaaggaggactacttcaagaagatcgagtgcttcgactccgttgagatcagcggagtcgaagaccgatttaatgcctccctcggtacgtatcatgatctcctcaagattatcaaggataaggacttccttgataatgaggagaatgaggatattctcgaggacattgtgctgaccctcaccctgttcgaagaccgtgagatgattgaggaacggttgaagacctacgctcatctgtttgatgacaaggtcatgaagcagttgaagcgtaggcgttataccggctggggtcgtctttcccgaaagcttatcaacgggatccgtgataagcagtcgggaaagacgatcctagacttcctcaagtctgacggttttgcgaacaggaacttcatgcagctcatccacgacgactccttgaccttcaaggaggatatccagaaggcgcaggtgagcggccagggcgatagcttgcacgagcatatcgcgaacctggccggctcacctgcgatcaagaagggtatcctccagacggtcaaggtcgtggatgagctcgtgaaggtgatgggtcggcacaagcccgagaatatcgtcatcgagatggctcgcgagaatcagacgacccagaagggtcagaagaattctcgcgagcgcatgaagcgtatcgaggagggcattaaggagctgggcagtcagattctcaaggagcaccctgtcgagaacacgcagcttcagaacgagaagctgtatctttactacctccagaacggacgggacatgtacgtagatcaggagctggacatcaaccggctctctgactacgatgtggactctatagtgcctcagagctttctgaaggacgatagcatcgacaacaaggtcctgactcgctccgataagaatcggggcaagtcggacaatgtcccgtccgaggaggtagtgaagaagatgaagaactattggcgtcagctgttgaacgcgaagctgatcactcagagaaagttcgataatctcaccaaggccgagagggggggtctgagcgagcttgataaggcgggtttcatcaagcggcagcttgttgagacccgccagatcacgaagcacgtcgctcagatcctcgactctcggatgaacaccaagtacgacgagaatgacaagcttattcgggaggtcaaggtcattacccttaagtcgaagctcgtcagcgactttcgcaaggattttcagttttataaagttcgtgagataaacaattatcaccatgcccacgacgcgtacctgaacgccgtcgtgggcacggcgctgataaagaagtacccgaagctggagtccgagttcgtttatggcgattataaggtgtacgacgtgcgcaagatgatcgccaagagcgagcaggagatcggaaaggctacggcgaagtacttcttttacagcaacatcatgaacttttttaagactgagatcacccttgcgaatggcgagatccgcaagcgcccgttgatcgagacgaacggggagactggggagattgtgtgggataagggtcgggatttcgctacggtgagaaaggttctttcgatgccccaggtcaacatcgtcaagaagacggaggttcagaccgggggcttctcgaaagaatctatcttaccgaagcgaaattccgacaagcttatcgcacgcaagaaggactgggaccccaagaagtacggggggttcgacagtcctacggtggcctactccgtgttggtggtcgccaaggttgagaagggcaagagcaagaagctcaagtccgtcaaggagctcttggggatcaccatcatggagaggtcatcgtttgagaagaatcctattgacttccttgaagccaagggctacaaggaagtcaagaaggatttgatcatcaagctccccaagtactccctgttcgagctcgagaacgggcgcaagcggatgctcgccagcgctggcgagcttcagaagggtaatgagcttgccctcccgagtaagtatgtcaatttcttgtacttggcgtcgcactacgagaagctgaagggctcgccggaggacaacgagcagaagcagcttttcgtagagcagcacaagcactaccttgatgagattatcgagcagatctctgagttcagcaagcgcgttatactagctgacgccaatctcgacaaggtgctctcggcttataacaagcaccgggataagccgatacgtgagcaggcggagaacatcatccacctgttcacgttgacgaacttgggggccccggcagcgttcaagtattttgatactacgatcgatcggaagcgttacaccagcaccaaggaggtcttggacgcgaccttgattcatcagtcgatcacgggtctttacgagactcgaattgacctttctcagcttggtggtgacagtggcggctcttcaggcggctccaagaggactgcggatggttctgaattcgaatcacctaagaagaagcggaaggtctccggggggtcgtccgggggctctatggacagcacgaaggagaagtgcgactcttataaggatgacctgcttctccggatggggctcaatgacaataaagccgggatggagggcctcgataaggagaagatcaacaagatcatcatggaggccactaaggggtcccggttttatggcaatgagctcaagaaggagaagcaggtcaaccagcgcatcgagaacatgatgcagcagaaggctcagataactagtcagcagctgcgcaaggcgcagctgcaggtggacagattcgccatggagctcgagcagtcgcgcaacttgagcaacacgattgtccacatcgacatggacgcgttctacgcggccgtggagatgcgggacaatcctgagctcaaggacaagccgattgctgtgggctccatgtcgatgctgtccacctctaactaccatgcccggaggttcggtgtccgcgctgctatgcccggctttatagcgaagcgcctctgtcctcagctaattatcgttcctccaaacttcgataagtacagggccgtgtccaaggaggtcaaggagattctggcggactacgacccgaatttcatggccatgtccttggacgaggcgtacctgaacattacgaagcatttggaggagcgacagaattggcctgaggacaagaggcgctactttataaagatgggcagcagcgtggagaacgataatccgggcaaggaagttaacaagttgtctgagcatgagaggagcatttctcctttgctgttcgaggagagcccctcggacgtgcagccccccggagacccgtttcaggtgaacttcgaagagcagaacaatccgcagatcctccagaacagcgtggtgttcggcacgagtgcccaggaggtggtcaaggagattcgttttcgcatcgagcagaagacgaccttgaccgcctccgcgggcatcgcgccgaacaccatgctggccaaggtttgttctgacaagaacaagcctaatggccagtaccagatcctcccaaaccgtcaagccgtgatggacttcatcaaggacctgccgattcggaaggtatctggtatcggtaaggttaccgagaagatgctgaaggccctgggcatcataacttgcacagagctctaccagcagcgagcgctcctcagcctgttgttctccgagacctcttggcactactttcttcacatctctctgggcctgggctcgacccacttgacccgagaccgagtgaggaagagtatgagtgtcgagaggaccttctcggagatcaacaaggctgaggagcagtactcgctgtgccaggagctctgtagcgagttagcccaggaccttcagaaggagcgcctgaagggccgcactgtcaccatcaagctgaagaatgtcaacttcgaggtgaagacccgggccagcactgttagttccgtggtgtccacggccgaggagatcttcgctatcgccaaggagcttcttaagacggagatcgacgcggactttccgcatccgcttcgcctccgccttatgggcgtccggatctcctcgtttcctaacgaggaggaccggaagcaccagcaaggcggaggctcaggcaagcggaccgctgacggctccggggggggctctccgaaaaagaagcggaaggtttgactagcaccagcctcaagaacacccgaatggagtctctaagctacataataccaacttacactttacaaaatgttgtcccccaaaatgtagccattcgtatctgctcctaataaaaagaaagtttcttcacattctctcgagaaaaaaaaaaaatggaaaaaaaaaaaacggaaaaaaaaaaaaggtaaaaaaaaaaaatataaaaaaaaaaaacataaaaaaaaaaaacgaaaaaaaaaaaacgtaaaaaaaaaaaactcaaaaaaaaaaaagataaaaaaaaaaaacctaaaaaaaaaaaatgtaaaaaaaaaaaagggaaaaaaaaaaaacgcaaaaaaaaaaaacacaaaaaaaaaaaatgcaaaaaaaaaaaatcgaaaaaaaaaaaatctaaaaaaaaaaaacgaaaaaaaaaaaacccaaaaaaaaaaaagacaaaaaaaaaaaatagaaaaaaaaaaagttaaaaaaaaaaaactgaaaaaaaaaaaatttaaaaaaaaaaaatctag

SEQ ID NO: 2648 - DNA, 6559 bp, synthetic construct; identical to SEQ ID NO: 2563
  misc_feature 1..6559: note = Synthetic
  source 1..6559: mol_type = other DNA

SEQ ID NO: 2649 - DNA, 6604 bp, synthetic construct; identical to SEQ ID NO: 2564
  misc_feature 1..6604: note = Synthetic
  source 1..6604: mol_type = other DNA

SEQ ID NO: 2650 - DNA, 6574 bp, synthetic construct; identical to SEQ ID NO: 2565
  misc_feature 1..6574: note = Synthetic
  source 1..6574: mol_type = other DNA

SEQ ID NO: 2651 - DNA, 6524 bp, synthetic construct; identical to SEQ ID NO: 2566
  misc_feature 1..6524: note = Synthetic
  source 1..6524: mol_type = other DNA

SEQ ID NO: 2652 - DNA, 6469 bp, synthetic construct
  misc_feature 1..6469: note = Synthetic
  source 1..6469: mol_type = other DNA
aggaagctcagaataaacgctcaactttggccggatctgccaccatgaaaagaactgctgacggatcagactttgaaagccctaaaaaaaaacggaaggtggacaagaagtactccatcggcctggacatcggcaccaactccgtgggctgggccgtgatcaccgacgagtacaaggtgccctccaagaagttcaaggtgctgggcaacaccgaccggcactccatcaagaagaacctgatcggcgccctgctgttcgactccggcgagaccgccgaggccacccggctgaagcggaccgcccggcggcggtacacccggcggaagaaccggatctgctacctgcaggagatcttctccaacgagatggccaaggtggacgactccttcttccaccggctggaggagtccttcctggtggaggaggacaagaagcacgagcggcaccccatcttcggcaacatcgtggacgaggtggcctaccacgagaagtaccccaccatctaccacctgcggaagaagctggtggactccaccgacaaggccgacctgcggctgatctacctggccctggcccacatgatcaagttccggggccacttcctgatcgagggcgacctgaaccccgacaactccgacgtggacaagctgttcatccagctggtgcagacctacaaccagctgttcgaggagaaccccatcaacgcctccggcgtggacgccaaggccatcctgtccgcccggctgtccaagtcccggcggctggagaacctgatcgcccagctgcccggcgagaagaagaacggcctgttcggcaacctgatcgccctgtccctgggcctgacccccaacttcaagtccaacttcgacctggccgaggacgccaagctgcagctgtccaaggacacctacgacgacgacctggacaacctgctggcccagatcggcgaccagtacgccgacctgttcctggccgccaagaacctgtccgacgccatcctgctgtccgacatcctgcgggtgaacaccgagatcaccaaggcccccctgtccgcctccatgatcaagcggtacgacgagcaccaccaggacctgaccctgctgaaggccctggtgcggcagcagctgcccgagaagtacaaggagatcttcttcgaccagtccaagaacggctacgccggctacatcgacggcggcgcctcccaggaggagttctacaagttcatcaagcccatcctggagaagatggacggcaccgaggagctgctggtgaagctgaaccgggaggacctgctgcggaagcagcggaccttcgacaacggctccatcccccaccagatccacctgggcgagctgcacgccatcctgcggcggcaggaggacttctaccccttcctgaaggacaaccgggagaagatcgagaagatcctgaccttccggatcccctactacgtgggccccctggcccggggcaactcccggttcgcctggatgacccggaagtccgaggagaccatcaccccctggaacttcgaggaggtggtggacaagggcgcctccgcccagtccttcatcgagcggatgaccaacttcgacaagaacctgcccaacgagaaggtgctgcccaagcactccctgctgtacgagtacttcaccgtgtacaacgagctgaccaaggtgaagtacgtgaccgagggcatgcggaagcccgccttcctgtccggcgagcagaagaaggccatcgtggacctgctgttcaagaccaaccggaaggtgaccgtgaagcagctgaaggaggactacttcaagaagatcgagtgcttcgactccgtggagatctccggcgtggaggaccggttcaacgcctccctgggcacctaccacgacctgctgaagatcatcaaggacaaggacttcctggacaacgaggagaacgaggacatcctggaggacatcgtgctgaccctgaccctgttcgaggaccgggagatgatcgaggagcggctgaagacctacgcccacctgttcgacgacaaggtgatgaagcagctgaagcggcggcggtacaccggctggggccggctgtcccggaagctgatcaacggcatccgggacaagcagtccggcaagaccatcctggacttcctgaagtccgacggcttcgccaaccggaacttcatgcagctgatccacgacgactccctgaccttcaaggaggacatccagaaggcccaggtgtccggccagggcgactccctgcacgagcacatcgccaacctggccggctcccccgccatcaagaagggcatcctgcagaccgtgaaggtggtggacgagctggtgaaggtgatgggccggcacaagcccgagaacatcgtgatcgagatggcccgggagaaccagaccacccagaagggccagaagaactcccgggagcggatgaagcggatcgaggagggcatcaaggagctgggctcccagatcctgaaggagcaccccgtggagaacacccagctgcagaacgagaagctgtacctgtactacctgcagaacggccgggacatgtacgtggaccaggagctggacatcaaccggctgtccgactacgacgtggacgccatcgtgccccagtccttcctgaaggacgactccatcgacaacaaggtgctgacccggtccgacaagaaccggggcaagtccgacaacgtgccctccgaggaggtggtgaagaagatgaagaactactggcggcagctgctgaacgccaagctgatcacccagcggaagttcgacaacctgaccaaggccgagcggggcggcctgtccgagctggacaaggccggcttcatcaagcggcagctggtggagacccggcagatcaccaagcacgtggcccagatcctggactcccggatgaacaccaagtacgacgagaacgacaagctgatccgggaggtgaaggtgatcaccctgaagtccaagctggtgtccgacttccggaaggacttccagttctacaaggtgcgggagatcaacaactaccaccacgcccacgacgcctacctgaacgccgtggtgggcaccgccctgatcaagaagtaccccaagctggagtccgagttcgtgtacggcgactacaaggtgtacgacgtgcggaagatgatcgccaagtccgagcaggagatcggcaaggccaccgccaagtacttcttctactccaacatcatgaacttcttcaagaccgagatcaccctggccaacggcgagatccggaagcggcccctgatcgagaccaacggcgagaccggcgagatcgtgtgggacaagggccgggacttcgccaccgtgcggaaggtgctgtccatgccccaggtgaacatcgtgaagaagaccgaggtgcagaccggcggcttctccaaggagtccatcctgcccaagcggaactccgacaagctgatcgcccggaagaaggactgggaccccaagaagtacggcggcttcgactcccccaccgtggcctactccgtgctggtggtggccaaggtggagaagggcaagtccaagaagctgaagtccgtgaaggagctgctgggcatcaccatcatggagcggtcctccttcgagaagaaccccatcgacttcctggaggccaagggctacaaggaggtgaagaaggacctgatcatcaagctgcccaagtactccctgttcgagctggagaacggccggaagcggatgctggcctccgccggcgagctgcagaagggcaacgagctggccctgccctccaagtacgtgaacttcctgtacctggcctcccactacgagaagctgaagggctcccccgaggacaacgagcagaagcagctgttcgtggagcagcacaagcactacctggacgagatcatcgagcagatctccgagttctccaagcgggtgatcctggccgacgccaacctggacaaggtgctgtccgcctacaacaagcaccgggacaagcccatccgggagcaggccgagaacatcatccacctgttcaccctgaccaacctgggcgcccccgccgccttcaagtacttcgacaccaccatcgaccggaagcggtacacctccaccaaggaggtgctggacgccaccctgatccaccagtccatcaccggcctgtacgagacccggatcgacctgtcccagctgggcggcgactccggcggctcctccggcggctccaagcggaccgccgacggctccgagttcgagtcccccaagaagaagcggaaggtgtccggcggctcctccggcggctccatggactccaccaaggagaagtgcgactcctacaaggacgacctgctgctgcggatgggcctgaacgacaacaaggccggcatggagggcctggacaaggagaagatcaacaagatcatcatggaggccaccaagggctcccggttctacggcaacgagctgaagaaggagaagcaggtgaaccagcggatcgagaacatgatgcagcagaaggcccagatcacctcccagcagctgcggaaggcccagctgcaggtggaccggttcgccatggagctggagcagtcccggaacctgtccaacaccatcgtgcacatcgacatggacgccttctacgccgccgtggagatgcgggacaaccccgagctgaaggacaagcccatcgccgtgggctccatgtccatgctgtccacctccaactaccacgcccggcggttcggcgtgcgggccgccatgcccggcttcatcgccaagcggctgtgcccccagctgatcatcgtgccccccaacttcgacaagtaccgggccgtgtccaaggaggtgaaggagatcctggccgactacgaccccaacttcatggccatgtccctggacgaggcctacctgaacatcaccaagcacctggaggagcggcagaactggcccgaggacaagcggcggtacttcatcaagatgggctcctccgtggagaacgacaaccccggcaaggaggtgaacaagctgtccgagcacgagcggtccatctcccccctgctgttcgaggagtccccctccgacgtgcagccccccggcgaccccttccaggtgaacttcgaggagcagaacaacccccagatcctgcagaactccgtggtgttcggcacctccgcccaggaggtggtgaaggagatccggttccggatcgagcagaagaccaccctgaccgcctccgccggcatcgcccccaacaccatgctggccaaggtgtgctccgacaagaacaagcccaacggccagtaccagatcctgcccaaccggcaggccgtgatggacttcatcaaggacctgcccatccggaaggtgtccggcatcggcaaggtgaccgagaagatgctgaaggccctgggcatcatcacctgcaccgagctgtaccagcagcgggccctgctgtccctgctgttctccgagacctcctggcactacttcctgcacatctccctgggcctgggctccacccacctgacccgggaccgggtgcggaagtccatgtccgtggagcggaccttctccgagatcaacaaggccgaggagcagtactccctgtgccaggagctgtgctccgagctggcccaggacctgcagaaggagcggctgaagggccggaccgtgaccatcaagctgaagaacgtgaacttcgaggtgaagacccgggcctccaccgtgtcctccgtggtgtccaccgccgaggagatcttcgccatcgccaaggagctgctgaagaccgagatcgacgccgacttcccccaccccctgcggctgcggctgatgggcgtgcggatctcctccttccccaacgaggaggaccggaagcaccagcagggcggcggctccggcaagcggaccgccgacggctccggcggcggctcccccaagaagaagcggaaggtgtagctagcaccagcctcaagaacacccgaatggagtctctaagctacataataccaacttacactttacaaaatgttgtcccccaaaatgtagccattcgtatctgctcctaataaaaagaaagtttcttcacattctctcgagaaaaaaaaaaaatggaaaaaaaaaaaacggaaaaaaaaaaaaggtaaaaaaaaaaaatataaaaaaaaaaaacataaaaaaaaaaaacgaaaaaaaaaaaacgtaaaaaaaaaaaactcaaaaaaaaaaaagataaaaaaaaaaaacctaaaaaaaaaaaatgtaaaaaaaaaaaagggaaaaaaaaaaaacgcaaaaaaaaaaaacacaaaaaaaaaaaatgcaaaaaaaaaaaatcgaaaaaaaaaaaatctaaaaaaaaaaaacgaaaaaaaaaaaacccaaaaaaaaaaaagacaaaaaaaaaaaatagaaaaaaaaaaagttaaaaaaaaaaaactgaaaaaaaaaaaatttaaaaaaaaaaaatctag

SEQ ID NO: 2653 - DNA, 6641 bp, synthetic construct; identical to SEQ ID NO: 2568
  misc_feature 1..6641: note = Synthetic
  source 1..6641: mol_type = other DNA

SEQ ID NO: 2654 - DNA, 6469 bp, synthetic construct
  misc_feature 1..6469: note = Synthetic
  source 1..6469: mol_type = other DNA
aggaagctcagaataaacgctcaactttggccggatctgccaccatgaagcggaccgccgacggctccgagttcgagtcccccaagaagaagcggaaggtggacaagaagtactccatcggcctggacatcggcaccaactccgtgggctgggccgtgatcaccgacgagtacaaggtgccctccaagaagttcaaggtgctgggcaacaccgaccggcactccatcaagaagaacctgatcggcgccctgctgttcgactccggcgagaccgccgaggccacccggctgaagcggaccgcccggcggcggtacacccggcggaagaaccggatctgctacctgcaggagatcttctccaacgagatggccaaggtggacgactccttcttccaccggctggaggagtccttcctggtggaggaggacaagaagcacgagcggcaccccatcttcggcaacatcgtggacgaggtggcctaccacgagaagtaccccaccatctaccacctgcggaagaagctggtggactccaccgacaaggccgacctgcggctgatctacctggccctggcccacatgatcaagttccggggccacttcctgatcgagggcgacctgaaccccgacaactccgacgtggacaagctgttcatccagctggtgcagacctacaaccagctgttcgaggagaaccccatcaacgcctccggcgtggacgccaaggccatcctgtccgcccggctgtccaagtcccggcggctggagaacctgatcgcccagctgcccggcgagaagaagaacggcctgttcggcaacctgatcgccctgtccctgggcctgacccccaacttcaagtccaacttcgacctggccgaggacgccaagctgcagctgtccaaggacacctacgacgacgacctggacaacctgctggcccagatcggcgaccagtacgccgacctgttcctggccgccaagaacctgtccgacgccatcctgctgtccgacatcctgcgggtgaacaccgagatcaccaaggcccccctgtccgcctccatgatcaagcggtacgacgagcaccaccaggacctgaccctgctgaaggccctggtgcggcagcagctgcccgagaagtacaaggagatcttcttcgaccagtccaagaacggctacgccggctacatcgacggcggcgcctcccaggaggagttctacaagttcatcaagcccatcctggagaagatggacggcaccgaggagctgctggtgaagctgaaccgggaggacctgctgcggaagcagcggaccttcgacaacggctccatcccccaccagatccacctgggcgagctgcacgccatcctgcggcggcaggaggacttctaccccttcctgaaggacaaccgggagaagatcgagaagatcctgaccttccggatcccctactacgtgggccccctggcccggggcaactcccggttcgcctggatgacccggaagtccgaggagaccatcaccccctggaacttcgaggaggtggtggacaagggcgcctccgcccagtccttcatcgagcggatgaccaacttcgacaagaacctgcccaacgagaaggtgctgcccaagcactccctgctgtacgagtacttcaccgtgtacaacgagctgaccaaggtgaagtacgtgaccgagggcatgcggaagcccgccttcctgtccggcgagcagaagaaggccatcgtggacctgctgttcaagaccaaccggaaggtgaccgtgaagcagctgaaggaggactacttcaagaagatcgagtgcttcgactccgtggagatctccggcgtggaggaccggttcaacgcctccctgggcacctaccacgacctgctgaagatcatcaaggacaaggacttcctggacaacgaggagaacgaggacatcctggaggacatcgtgctgaccctgaccctgttcgaggaccgggagatgatcgaggagcggctgaagacctacgcccacctgttcgacgacaaggtgatgaagcagctgaagcggcggcggtacaccggctggggccggctgtcccggaagctgatcaacggcatccgggacaagcagtccggcaagaccatcctggacttcctgaagtccgacggcttcgccaaccggaacttcatgcagctgatccacgacgactccctgaccttcaaggaggacatccagaaggcccaggtgtccggccagggcgactccctgcacgagcacatcgccaacctggccggctcccccgccatcaagaagggcatcctgcagaccgtgaaggtggtggacgagctggtgaaggtgatgggccggcacaagcccgagaacatcgtgatcgagatggcccgggagaaccagaccacccagaagggccagaagaactcccgggagcggatgaagcggatcgaggagggcatcaaggagctgggctcccagatcctgaaggagcaccccgtggagaacacccagctgcagaacgagaagctgtacctgtactacctgcagaacggccgggacatgtacgtggaccaggagctggacatcaaccggctgtccgactacgacgtggacgacatcgtgccccagtccttcctgaaggacgactccatcgacaacaaggtgctgacccggtccgacaagaaccggggcaagtccgacaacgtgccctccgaggaggtggtgaagaagatgaagaactactggcggcagctgctgaacgccaagctgatcacccagcggaagttcgacaacctgaccaaggccgagcggggcggcctgtccgagctggacaaggccggcttcatcaagcggcagctggtggagacccggcagatcaccaagcacgtggcccagatcctggactcccggatgaacaccaagtacgacgagaacgacaagctgatccgggaggtgaaggtgatcaccctgaagtccaagctggtgtccgacttccggaaggacttccagttctacaaggtgcgggagatcaacaactaccaccacgcccacgacgcctacctgaacgccgtggtgggcaccgccctgatcaagaagtaccccaagctggagtccgagttcgtgtacggcgactacaaggtgtacgacgtgcggaagatgatcgccaagtccgagcaggagatcggcaaggccaccgccaagtacttcttctactccaacatcatgaacttcttcaagaccgagatcaccctggccaacggcgagatccggaagcggcccctgatcgagaccaacggcgagaccggcgagatcgtgtgggacaagggccgggacttcgccaccgtgcggaaggtgctgtccatgccccaggtgaacatcgtgaagaagaccgaggtgcagaccggcggcttctccaaggagtccatcctgcccaagcggaactccgacaagctgatcgcccggaagaaggactgggaccccaagaagtacggcggcttcgactcccccaccgtggcctactccgtgctggtggtggccaaggtggagaagggcaagtccaagaagctgaagtccgtgaaggagctgctgggcatcaccatcatggagcggtcctccttcgagaagaaccccatcgacttcctggaggccaagggctacaaggaggtgaagaaggacctgatcatcaagctgcccaagtactccctgttcgagctggagaacggccggaagcggatgctggcctccgccggcgagctgcagaagggcaacgagctggccctgccctccaagtacgtgaacttcctgtacctggcctcccactacgagaagctgaagggctcccccgaggacaacgagcagaagcagctgttcgtggagcagcacaagcactacctggacgagatcatcgagcagatctccgagttctccaagcgggtgatcctggccgacgccaacctggacaaggtgctgtccgcctacaacaagcaccgggacaagcccatccgggagcaggccgagaacatcatccacctgttcaccctgaccaacctgggcgcccccgccgccttcaagtacttcgacaccaccatcgaccggaagcggtacacctccaccaaggaggtgctggacgccaccctgatccaccagtccatcaccggcctgtacgagacccggatcgacctgtcccagctgggcggcgactccggcggctcctccggcggctccaagcggaccgccgacggctccgagttcgagtcccccaagaagaagcggaaggtgtccggcggctcctccggcggctccatggactccaccaaggagaagtgcgactcctacaaggacgacctgctgctgcggatgggcctgaacgacaacaaggccggcatggagggcctggacaaggagaagatcaacaagatcatcatggaggccaccaagggctcccggttctacggcaacgagctgaagaaggagaagcaggtgaaccagcggatcgagaacatgatgcagcagaaggcccagatcacctcccagcagctgcggaaggcccagctgcaggtggaccggttcgccatggagctggagcagtcccggaacctgtccaacaccatcgtgcacatcgacatggacgccttctacgccgccgtggagatgcgggacaaccccgagctgaaggacaagcccatcgccgtgggctccatgtccatgctgtccacctccaactaccacgcccggcggttcggcgtgcgggccgccatgcccggcttcatcgccaagcggctgtgcccccagctgatcatcgtgccccccaacttcgacaagtaccgggccgtgtccaaggaggtgaaggagatcctggccgactacgaccccaacttcatggccatgtccctggacgaggcctacctgaacatcaccaagcacctggaggagcggcagaactggcccgaggacaagcggcggtacttcatcaagatgggctcctccgtggagaacgacaaccccggcaaggaggtgaacaagctgtccgagcacgagcggtccatctcccccctgctgttcgaggagtccccctccgacgtgcagccccccggcgaccccttccaggtgaacttcgaggagcagaacaacccccagatcctgcagaactccgtggtgttcggcacctccgcccaggaggtggtgaaggagatccggttccggatcgagcagaagaccaccctgaccgcctccgccggcatcgcccccaacaccatgctggccaaggtgtgctccgacaagaacaagcccaacggccagtaccagatcctgcccaaccggcaggccgtgatggacttcatcaaggacctgcccatccggaaggtgtccggcatcggcaaggtgaccgagaagatgctgaaggccctgggcatcatcacctgcaccgagctgtaccagcagcgggccctgctgtccctgctgttctccgagacctcctggcactacttcctgcacatctccctgggcctgggctccacccacctgacccgggaccgggtgcggaagtccatgtccgtggagcggaccttctccgagatcaacaaggccgaggagcagtactccctgtgccaggagctgtgctccgagctggcccaggacctgcagaaggagcggctgaagggccggaccgtgaccatcaagctgaagaacgtgaacttcgaggtgaagacccgggcctccaccgtgtcctccgtggtgtccaccgccgaggagatcttcgccatcgccaaggagctgctgaagaccgagatcgacgccgacttcccccaccccctgcggctgcggctgatgggcgtgcggatctcctccttccccaacgaggaggaccggaagcaccagcagggcggcggctccggcaagcggaccgccgacggctccggcggcggctcccccaagaagaagcggaaggtgtagctagcaccagcctcaagaacacccgaatggagtctctaagctacataataccaacttacactttacaaaatgttgtcccccaaaatgtagccattcgtatctgctcctaataaaaagaaagtttcttcacattctctcgagaaaaaaaaaaaatggaaaaaaaaaaaacggaaaaaaaaaaaaggtaaaaaaaaaaaatataaaaaaaaaaaacataaaaaaaaaaaacgaaaaaaaaaaaacgtaaaaaaaaaaaactcaaaaaaaaaaaagataaaaaaaaaaaacctaaaaaaaaaaaatgtaaaaaaaaaaaagggaaaaaaaaaaaacgcaaaaaaaaaaaacacaaaaaaaaaaaatgcaaaaaaaaaaaatcgaaaaaaaaaaaatctaaaaaaaaaaaacgaaaaaaaaaaaacccaaaaaaaaaaaagacaaaaaaaaaaaatagaaaaaaaaaaagttaaaaaaaaaaaactgaaaaaaaaaaaatttaaaaaaaaaaaatctag

SEQ ID NO: 2655 - DNA, 6469 bp, synthetic construct
  misc_feature 1..6469: note = Synthetic
  source 1..6469: mol_type = other DNA
aggaagctcagaataaacgctcaactttggccggatctgccaccatgaagcggaccgccgacggctccgagttcgagtcccccaagaagaagcggaaggtggacaagaagtactccatcggcctggacatcggcaccaactccgtgggctgggccgtgatcaccgacgagtacaaggtgccctccaagaagttcaaggtgctgggcaacaccgaccggcactccatcaagaagaacctgatcggcgccctgctgttcgactccggcgagaccgccgaggccacccggctgaagcggaccgcccggcggcggtacacccggcggaagaaccggatctgctacctgcaggagatcttctccaacgagatggccaaggtggacgactccttcttccaccggctggaggagtccttcctggtggaggaggacaagaagcacgagcggcaccccatcttcggcaacatcgtggacgaggtggcctaccacgagaagtaccccaccatctaccacctgcggaagaagctggtggactccaccgacaaggccgacctgcggctgatctacctggccctggcccacatgatcaagttccggggccacttcctgatcgagggcgacctgaaccccgacaactccgacgtggacaagctgttcatccagctggtgcagacctacaaccagctgttcgaggagaaccccatcaacgcctccggcgtggacgccaaggccatcctgtccgcccggctgtccaagtcccggcggctggagaacctgatcgcccagctgcccggcgagaagaagaacggcctgttcggcaacctgatcgccctgtccctgggcctgacccccaacttcaagtccaacttcgacctggccgaggacgccaagctgcagctgtccaaggacacctacgacgacgacctggacaacctgctggcccagatcggcgaccagtacgccgacctgttcctggccgccaagaacctgtccgacgccatcctgctgtccgacatcctgcgggtgaacaccgagatcaccaaggcccccctgtccgcctccatgatcaagcggtacgacgagcaccaccaggacctgaccctgctgaaggccctggtgcggcagcagctgcccgagaagtacaaggagatcttcttcgaccagtccaagaacggctacgccggctacatcgacggcggcgcctcccaggaggagttctacaagttcatcaagcccatcctggagaagatggacggcaccgaggagctgctggtgaagctgaaccgggaggacctgctgcggaagcagcggaccttcgacaacggctccatcccccaccagatccacctgggcgagctgcacgccatcctgcggcggcaggaggacttctaccccttcctgaaggacaaccgggagaagatcgagaagatcctgaccttccggatcccctactacgtgggccccctggcccggggcaactcccggttcgcctggatgacccggaagtccgaggagaccatcaccccctggaacttcgaggaggtggtggacaagggcgcctccgcccagtccttcatcgagcggatgaccaacttcgacaagaacctgcccaacgagaaggtgctgcccaagcactccctgctgtacgagtacttcaccgtgtacaacgagctgaccaaggtgaagtacgtgaccgagggcatgcggaagcccgccttcctgtccggcgagcagaagaaggccatcgtggacctgctgttcaagaccaaccggaaggtgaccgtgaagcagctgaaggaggactacttcaagaagatcgagtgcttcgactccgtggagatctccggcgtggaggaccggttcaacgcctccctgggcacctaccacgacctgctgaagatcatcaaggacaaggacttcctggacaacgaggagaacgaggacatcctggaggacatcgtgctgaccctgaccctgttcgaggaccgggagatgatcgaggagcggctgaagacctacgcccacctgttcgacgacaaggtgatgaagcagctgaagcggcggcggtacaccggctggggccggctgtcccggaagctgatcaacggcatccgggacaagcagtccggcaagaccatcctggacttcctgaagtccgacggcttcgccaaccggaacttcatgcagctgatccacgacgactccctgaccttcaaggaggacatccagaaggcccaggtgtccggccagggcgactccctgcacgagcacatcgccaacctggccggctcccccgccatcaagaagggcatcctgcagaccgtgaaggtggtggacgagctggtgaaggtgatgggccggcacaagcccgagaacatcgtgatcgagatggcccgggagaaccagaccacccagaagggccagaagaactcccgggagcggatgaagcggatcgaggagggcatcaaggagctgggctcccagatcctgaaggagcaccccgtggagaacacccagctgcagaacgagaagctgtacctgtactacctgcagaacggccgggacatgtacgtggaccaggagctggacatcaaccggctgtccgactacgacgtggacttcatcgtgccccagtccttcctgaaggacgactccatcgacaacaaggtgctgacccggtccgacaagaaccggggcaagtccgacaacgtgccctccgaggaggtggtgaagaagatgaagaactactggcggcagctgctgaacgccaagctgatcacccagcggaagttcgacaacctgaccaaggccgagcggggcggcctgtccgagctggacaaggccggcttcatcaagcggcagctggtggagacccggcagatcaccaagcacgtggcccagatcctggactcccggatgaacaccaagtacgacgagaacgacaagctgatccgggaggtgaaggtgatcaccctgaagtccaagctggtgtccgacttccggaaggacttccagttctacaaggtgcgggagatcaacaactaccaccacgcccacgacgcctacctgaacgccgtggtgggcaccgccctgatcaagaagtaccccaagctggagtccgagttcgtgtacggcgactacaaggtgtacgacgtgcggaagatgatcgccaagtccgagcaggagatcggcaaggccaccgccaagtacttcttctactccaacatcatgaacttcttcaagaccgagatcaccctggccaacggcgagatccggaagcggcccctgatcgagaccaacggcgagaccggcgagatcgtgtgggacaagggccgggacttcgccaccgtgcggaaggtgctgtccatgccccaggtgaacatcgtgaagaagaccgaggtgcagaccggcggcttctccaaggagtccatcctgcccaagcggaactccgacaagctgatcgcccggaagaaggactgggaccccaagaagtacggcggcttcgactcccccaccgtggcctactccgtgctggtggtggccaaggtggagaagggcaagtccaagaagctgaagtccgtgaaggagctgctgggcatcaccatcatggagcggtcctccttcgagaagaaccccatcgacttcctggaggccaagggctacaaggaggtgaagaaggacctgatcatcaagctgcccaagtactccctgttcgagctggagaacggccggaagcggatgctggcctccgccggcgagctgcagaagggcaacgagctggccctgccctccaagtacgtgaacttcctgtacctggcctcccactacgagaagctgaagggctcccccgaggacaacgagcagaagcagctgttcgtggagcagcacaagcactacctggacgagatcatcgagcagatctccgagttctccaagcgggtgatcctggccgacgccaacctggacaaggtgctgtccgcctacaacaagcaccgggacaagcccatccgggagcaggccgagaacatcatccacctgttcaccctgaccaacctgggcgcccccgccgccttcaagtacttcgacaccaccatcgaccggaagcggtacacctccaccaaggaggtgctggacgccaccctgatccaccagtccatcaccggcctgtacgagacccggatcgacctgtcccagctgggcggcgactccggcggctcctccggcggctccaagcggaccgccgacggctccgagttcgagtcccccaagaagaagcggaaggtgtccggcggctcctccggcggctccatggactccaccaaggagaagtgcgactcctacaaggacgacctgctgctgcggatgggcctgaacgacaacaaggccggcatggagggcctggacaaggagaagatcaacaagatcatcatggaggccaccaagggctcccggttctacggcaacgagctgaagaaggagaagcaggtgaaccagcggatcgagaacatgatgcagcagaaggcccagatcacctcccagcagctgcggaaggcccagctgcaggtggaccggttcgccatggagctggagcagtcccggaacctgtccaacaccatcgtgcacatcgacatggacgccttctacgccgccgtggagatgcgggacaaccccgagctgaaggacaagcccatcgccgtgggctccatgtccatgctgtccacctccaactaccacgcccggcggttcggcgtgcgggccgccatgcccggcttcatcgccaagcggctgtgcccccagctgatcatcgtgccccccaacttcgacaagtaccgggccgtgtccaaggaggtgaaggagatcctggccgactacgaccccaacttcatggccatgtccctggacgaggcctacctgaacatcaccaagcacctggaggagcggcagaactggcccgaggacaagcggcggtacttcatcaagatgggctcctccgtggagaacgacaaccccggcaaggaggtgaacaagctgtccgagcacgagcggtccatctcccccctgctgttcgaggagtccccctccgacgtgcagccccccggcgaccccttccaggtgaacttcgaggagcagaacaacccccagatcctgcagaactccgtggtgttcggcacctccgcccaggaggtggtgaaggagatccggttccggatcgagcagaagaccaccctgaccgcctccgccggcatcgcccccaacaccatgctggccaaggtgtgctccgacaagaacaagcccaacggccagtaccagatcctgcccaaccggcaggccgtgatggacttcatcaaggacctgcccatccggaaggtgtccggcatcggcaaggtgaccgagaagatgctgaaggccctgggcatcatcacctgcaccgagctgtaccagcagcgggccctgctgtccctgctgttctccgagacctcctggcactacttcctgcacatctccctgggcctgggctccacccacctgacccgggaccgggtgcggaagtccatgtccgtggagcggaccttctccgagatcaacaaggccgaggagcagtactccctgtgccaggagctgtgctccgagctggcccaggacctgcagaaggagcggctgaagggccggaccgtgaccatcaagctgaagaacgtgaacttcgaggtgaagacccgggcctccaccgtgtcctccgtggtgtccaccgccgaggagatcttcgccatcgccaaggagctgctgaagaccgagatcgacgccgacttcccccaccccctgcggctgcggctgatgggcgtgcggatctcctccttccccaacgaggaggaccggaagcaccagcagggcggcggctccggcaagcggaccgccgacggctccggcggcggctcccccaagaagaagcggaaggtgtagctagcaccagcctcaagaacacccgaatggagtctctaagctacataataccaacttacactttacaaaatgttgtcccccaaaatgtagccattcgtatctgctcctaataaaaagaaagtttcttcacattctctcgagaaaaaaaaaaaatggaaaaaaaaaaaacggaaaaaaaaaaaaggtaaaaaaaaaaaatataaaaaaaaaaaacataaaaaaaaaaaacgaaaaaaaaaaaacgtaaaaaaaaaaaactcaaaaaaaaaaaagataaaaaaaaaaaacctaaaaaaaaaaaatgtaaaaaaaaaaaagggaaaaaaaaaaaacgcaaaaaaaaaaaacacaaaaaaaaaaaatgcaaaaaaaaaaaatcgaaaaaaaaaaaatctaaaaaaaaaaaacgaaaaaaaaaaaacccaaaaaaaaaaaagacaaaaaaaaaaaatagaaaaaaaaaaagttaaaaaaaaaaaactgaaaaaaaaaaaatttaaaaaaaaaaaatctag

SEQ ID NO: 2656 - DNA, 6469 bp, synthetic construct
  misc_feature 1..6469: note = Synthetic
  source 1..6469: mol_type = other DNA
aggaagctcagaataaacgctcaactttggccggatctgccaccatgaagcggaccgccgacggctccgagttcgagtcccccaagaagaagcggaaggtggacaagaagtactccatcggcctggacatcggcaccaactccgtgggctgggccgtgatcaccgacgagtacaaggtgccctccaagaagttcaaggtgctgggcaacaccgaccggcactccatcaagaagaacctgatcggcgccctgctgttcgactccggcgagaccgccgaggccacccggctgaagcggaccgcccggcggcggtacacccggcggaagaaccggatctgctacctgcaggagatcttctccaacgagatggccaaggtggacgactccttcttccaccggctggaggagtccttcctggtggaggaggacaagaagcacgagcggcaccccatcttcggcaacatcgtggacgaggtggcctaccacgagaagtaccccaccatctaccacctgcggaagaagctggtggactccaccgacaaggccgacctgcggctgatctacctggccctggcccacatgatcaagttccggggccacttcctgatcgagggcgacctgaaccccgacaactccgacgtggacaagctgttcatccagctggtgcagacctacaaccagctgttcgaggagaaccccatcaacgcctccggcgtggacgccaaggccatcctgtccgcccggctgtccaagtcccggcggctggagaacctgatcgcccagctgcccggcgagaagaagaacggcctgttcggcaacctgatcgccctgtccctgggcctgacccccaacttcaagtccaacttcgacctggccgaggacgccaagctgcagctgtccaaggacacctacgacgacgacctggacaacctgctggcccagatcggcgaccagtacgccgacctgttcctggccgccaagaacctgtccgacgccatcctgctgtccgacatcctgcgggtgaacaccgagatcaccaaggcccccctgtccgcctccatgatcaagcggtacgacgagcaccaccaggacctgaccctgctgaaggccctggtgcggcagcagctgcccgagaagtacaaggagatcttcttcgaccagtccaagaacggctacgccggctacatcgacggcggcgcctcccaggaggagttctacaagttcatcaagcccatcctggagaagatggacggcaccgaggagctgctggtgaagctgaaccgggaggacctgctgcggaagcagcggaccttcgacaacggctccatcccccaccagatccacctgggcgagctgcacgccatcctgcggcggcaggaggacttctaccccttcctgaaggacaaccgggagaagatcgagaagatcctgaccttccggatcccctactacgtgggccccctggcccggggcaactcccggttcgcctggatgacccggaagtccgaggagaccatcaccccctggaacttcgaggaggtggtggacaagggcgcctccgcccagtccttcatcgagcggatgaccaacttcgacaagaacctgcccaacgagaaggtgctgcccaagcactccctgctgtacgagtacttcaccgtgtacaacgagctgaccaaggtgaagtacgtgaccgagggcatgcggaagcccgccttcctgtccggcgagcagaagaaggccatcgtggacctgctgttcaagaccaaccggaaggtgaccgtgaagcagctgaaggaggactacttcaagaagatcgagtgcttcgactccgtggagatctccggcgtggaggaccggttcaacgcctccctgggcacctaccacgacctgctgaagatcatcaaggacaaggacttcctggacaacgaggagaacgaggacatcctggaggacatcgtgctgaccctgaccctgttcgaggaccgggagatgatcgaggagcggctgaagacctacgcccacctgttcgacgacaaggtgatgaagcagctgaagcggcggcggtacaccggctggggccggctgtcccggaagctgatcaacggcatccgggacaagcagtccggcaagaccatcctggacttcctgaagtccgacggcttcgccaaccggaacttcatgcagctgatccacgacgactccctgaccttcaaggaggacatccagaaggcccaggtgtccggccagggcgactccctgcacgagcacatcgccaacctggccggctcccccgccatcaagaagggcatcctgcagaccgtgaaggtggtggacgagctggtgaaggtgatgggccggcacaagcccgagaacatcgtgatcgagatggcccgggagaaccagaccacccagaagggccagaagaactcccgggagcggatgaagcggatcgaggagggcatcaaggagctgggctcccagatcctgaaggagcaccccgtggagaacacccagctgcagaacgagaagctgtacctgtactacctgcagaacggccgggacatgtacgtggaccaggagctggacatcaaccggctgtccgactacgacgtggacaagatcgtgccccagtccttcctgaaggacgactccatcgacaacaaggtgctgacccggtccgacaagaaccggggcaagtccgacaacgtgccctccgaggaggtggtgaagaagatgaagaactactggcggcagctgctgaacgccaagctgatcacccagcggaagttcgacaacctgaccaaggccgagcggggcggcctgtccgagctggacaaggccggcttcatcaagcggcagctggtggagacccggcagatcaccaagcacgtggcccagatcctggactcccggatgaacaccaagtacgacgagaacgacaagctgatccgggaggtgaaggtgatcaccctgaagtccaagctggtgtccgacttccggaaggacttccagttctacaaggtgcgggagatcaacaactaccaccacgcccacgacgcctacctgaacgccgtggtgggcaccgccctgatcaagaagtaccccaagctggagtccgagttcgtgtacggcgactacaaggtgtacgacgtgcggaagatgatcgccaagtccgagcaggagatcggcaaggccaccgccaagtacttcttctactccaacatcatgaacttcttcaagaccgagatcaccctggccaacggcgagatccggaagcggcccctgatcgagaccaacggcgagaccggcgagatcgtgtgggacaagggccgggacttcgccaccgtgcggaaggtgctgtccatgccccaggtgaacatcgtgaagaagaccgaggtgcagaccggcggcttctccaaggagtccatcctgcccaagcggaactccgacaagctgatcgcccggaagaaggactgggaccccaagaagtacggcggcttcgactcccccaccgtggcctactccgtgctggtggtggccaaggtggagaagggcaagtccaagaagctgaagtccgtgaaggagctgctgggcatcaccatcatggagcggtcctccttcgagaagaaccccatcgacttcctggaggccaagggctacaaggaggtgaagaaggacctgatcatcaagctgcccaagtactccctgttcgagctggagaacggccggaagcggatgctggcctccgccggcgagctgcagaagggcaacgagctggccctgccctccaagtacgtgaacttcctgtacctggcctcccactacgagaagctgaagggctcccccgaggacaacgagcagaagcagctgttcgtggagcagcacaagcactacctggacgagatcatcgagcagatctccgagttctccaagcgggtgatcctggccgacgccaacctggacaaggtgctgtccgcctacaacaagcaccgggacaagcccatccgggagcaggccgagaacatcatccacctgttcaccctgaccaacctgggcgcccccgccgccttcaagtacttcgacaccaccatcgaccggaagcggtacacctccaccaaggaggtgctggacgccaccctgatccaccagtccatcaccggcctgtacgagacccggatcgacctgtcccagctgggcggcgactccggcggctcctccggcggctccaagcggaccgccgacggctccgagttcgagtcccccaagaagaagcggaaggtgtccggcggctcctccggcggctccatggactccaccaaggagaagtgcgactcctacaaggacgacctgctgctgcggatgggcctgaacgacaacaaggccggcatggagggcctggacaaggagaagatcaacaagatcatcatggaggccaccaagggctcccggttctacggcaacgagctgaagaaggagaagcaggtgaaccagcggatcgagaacatgatgcagcagaaggcccagatcacctcccagcagctgcggaaggcccagctgcaggtggaccggttcgccatggagctggagcagtcccggaacctgtccaacaccatcgtgcacatcgacatggacgccttctacgccgccgtggagatgcgggacaaccccgagctgaaggacaagcccatcgccgtgggctccatgtccatgctgtccacctccaactaccacgcccggcggttcggcgtgcgggccgccatgcccggcttcatcgccaagcggctgtgcccccagctgatcatcgtgccccccaacttcgacaagtaccgggccgtgtccaaggaggtgaaggagatcctggccgactacgaccccaacttcatggccatgtccctggacgaggcctacctgaacatcaccaagcacctggaggagcggcagaactggcccgaggacaagcggcggtacttcatcaagatgggctcctccgtggagaacgacaaccccggcaaggaggtgaacaagctgtccgagcacgagcggtccatctcccccctgctgttcgaggagtccccctccgacgtgcagccccccggcgaccccttccaggtgaacttcgaggagcagaacaacccccagatcctgcagaactccgtggtgttcggcacctccgcccaggaggtggtgaaggagatccggttccggatcgagcagaagaccaccctgaccgcctccgccggcatcgcccccaacaccatgctggccaaggtgtgctccgacaagaacaagcccaacggccagtaccagatcctgcccaaccggcaggccgtgatggacttcatcaaggacctgcccatccggaaggtgtccggcatcggcaaggtgaccgagaagatgctgaaggccctgggcatcatcacctgcaccgagctgtaccagcagcgggccctgctgtccctgctgttctccgagacctcctggcactacttcctgcacatctccctgggcctgggctccacccacctgacccgggaccgggtgcggaagtccatgtccgtggagcggaccttctccgagatcaacaaggccgaggagcagtactccctgtgccaggagctgtgctccgagctggcccaggacctgcagaaggagcggctgaagggccggaccgtgaccatcaagctgaagaacgtgaacttcgaggtgaagacccgggcctccaccgtgtcctccgtggtgtccaccgccgaggagatcttcgccatcgccaaggagctgctgaagaccgagatcgacgccgacttcccccaccccctgcggctgcggctgatgggcgtgcggatctcctccttccccaacgaggaggaccggaagcaccagcagggcggcggctccggcaagcggaccgccgacggctccggcggcggctcccccaagaagaagcggaaggtgtagctagcaccagcctcaagaacacccgaatggagtctctaagctacataataccaacttacactttacaaaatgttgtcccccaaaatgtagccattcgtatctgctcctaataaaaagaaagtttcttcacattctctcgagaaaaaaaaaaaatggaaaaaaaaaaaacggaaaaaaaaaaaaggtaaaaaaaaaaaatataaaaaaaaaaaacataaaaaaaaaaaacgaaaaaaaaaaaacgtaaaaaaaaaaaactcaaaaaaaaaaaagataaaaaaaaaaaacctaaaaaaaaaaaatgtaaaaaaaaaaaagggaaaaaaaaaaaacgcaaaaaaaaaaaacacaaaaaaaaaaaatgcaaaaaaaaaaaatcgaaaaaaaaaaaatctaaaaaaaaaaaacgaaaaaaaaaaaacccaaaaaaaaaaaagacaaaaaaaaaaaatagaaaaaaaaaaagttaaaaaaaaaaaactgaaaaaaaaaaaatttaaaaaaaaaaaatctag

SEQ ID NO: 2657 - DNA, 6469 bp, synthetic construct
  misc_feature 1..6469: note = Synthetic
  source 1..6469: mol_type = other DNA
aggaagctcagaataaacgctcaactttggccggatctgccaccatgaagcggaccgccgacggctccgagttcgagtcccccaagaagaagcggaaggtggacaagaagtactccatcggcctggacatcggcaccaactccgtgggctgggccgtgatcaccgacgagtacaaggtgccctccaagaagttcaaggtgctgggcaacaccgaccggcactccatcaagaagaacctgatcggcgccctgctgttcgactccggcgagaccgccgaggccacccggctgaagcggaccgcccggcggcggtacacccggcggaagaaccggatctgctacctgcaggagatcttctccaacgagatggccaaggtggacgactccttcttccaccggctggaggagtccttcctggtggaggaggacaagaagcacgagcggcaccccatcttcggcaacatcgtggacgaggtggcctaccacgagaagtaccccaccatctaccacctgcggaagaagctggtggactccaccgacaaggccgacctgcggctgatctacctggccctggcccacatgatcaagttccggggccacttcctgatcgagggcgacctgaaccccgacaactccgacgtggacaagctgttcatccagctggtgcagacctacaaccagctgttcgaggagaaccccatcaacgcctccggcgtggacgccaaggccatcctgtccgcccggctgtccaagtcccggcggctggagaacctgatcgcccagctgcccggcgagaagaagaacggcctgttcggcaacctgatcgccctgtccctgggcctgacccccaacttcaagtccaacttcgacctggccgaggacgccaagctgcagctgtccaaggacacctacgacgacgacctggacaacctgctggcccagatcggcgaccagtacgccgacctgttcctggccgccaagaacctgtccgacgccatcctgctgtccgacatcctgcgggtgaacaccgagatcaccaaggcccccctgtccgcctccatgatcaagcggtacgacgagcaccaccaggacctgaccctgctgaaggccctggtgcggcagcagctgcccgagaagtacaaggagatcttcttcgaccagtccaagaacggctacgccggctacatcgacggcggcgcctcccaggaggagttctacaagttcatcaagcccatcctggagaagatggacggcaccgaggagctgctggtgaagctgaaccgggaggacctgctgcggaagcagcggaccttcgacaacggctccatcccccaccagatccacctgggcgagctgcacgccatcctgcggcggcaggaggacttctaccccttcctgaaggacaaccgggagaagatcgagaagatcctgaccttccggatcccctactacgtgggccccctggcccggggcaactcccggttcgcctggatgacccggaagtccgaggagaccatcaccccctggaacttcgaggaggtggtggacaagggcgcctccgcccagtccttcatcgagcggatgaccaacttcgacaagaacctgcccaacgagaaggtgctgcccaagcactccctgctgtacgagtacttcaccgtgtacaacgagctgaccaaggtgaagtacgtgaccgagggcatgcggaagcccgccttcctgtccggcgagcagaagaaggccatcgtggacctgctgttcaagaccaaccggaaggtgaccgtgaagcagctgaaggaggactacttcaagaagatcgagtgcttcgactccgtggagatctccggcgtggaggaccggttcaacgcctccctgggcacctaccacgacctgctgaagatcatcaaggacaaggacttcctggacaacgaggagaacgaggacatcctggaggacatcgtgctgaccctgaccctgttcgaggaccgggagatgatcgaggagcggctgaagacctacgcccacctgttcgacgacaaggtgatgaagcagctgaagcggcggcggtacaccggctggggccggctgtcccggaagctgatcaacggcatccgggacaagcagtccggcaagaccatcctggacttcctgaagtccgacggcttcgccaaccggaacttcatgcagctgatccacgacgactccctgaccttcaaggaggacatccagaaggcccaggtgtccggccagggcgactccctgcacgagcacatcgccaacctggccggctcccccgccatcaagaagggcatcctgcagaccgtgaaggtggtggacgagctggtgaaggtgatgggccggcacaagcccgagaacatcgtgatcgagatggcccgggagaaccagaccacccagaagggccagaagaactcccgggagcggatgaagcggatcgaggagggcatcaaggagctgggctcccagatcctgaaggagcaccccgtggagaacacccagctgcagaacgagaagctgtacctgtactacctgcagaacggccgggacatgtacgtggaccaggagctggacatcaaccggctgtccgactacgacgtggacaacatcgtgccccagtccttcctgaaggacgactccatcgacaacaaggtgctgacccggtccgacaagaaccggggcaagtccgacaacgtgccctccgaggaggtggtgaagaagatgaagaactactggcggcagctgctgaacgccaagctgatcacccagcggaagttcgacaacctgaccaaggccgagcggggcggcctgtccgagctggacaaggccggcttcatcaagcggcagctggtggagacccggcagatcaccaagcacgtggcccagatcctggactcccggatgaacaccaagtacgacgagaacgacaagctgatccgggaggtgaaggtgatcaccctgaagtccaagctggtgtccgacttccggaaggacttccagttctacaaggtgcgggagatcaacaactaccaccacgcccacgacgcctacctgaacgccgtggtgggcaccgccctgatcaagaagtaccccaagctggagtccgagttcgtgtacggcgactacaaggtgtacgacgtgcggaagatgatcgccaagtccgagcaggagatcggcaaggccaccgccaagtacttcttctactccaacatcatgaacttcttcaagaccgagatcaccctggccaacggcgagatccggaagcggcccctgatcgagaccaacggcgagaccggcgagatcgtgtgggacaagggccgggacttcgccaccgtgcggaaggtgctgtccatgccccaggtgaacatcgtgaagaagaccgaggtgcagaccggcggcttctccaaggagtccatcctgcccaagcggaactccgacaagctgatcgcccggaagaaggactgggaccccaagaagtacggcggcttcgactcccccaccgtggcctactccgtgctggtggtggccaaggtggagaagggcaagtccaagaagctgaagtccgtgaaggagctgctgggcatcaccatcatggagcggtcctccttcgagaagaaccccatcgacttcctggaggccaagggctacaaggaggtgaagaaggacctgatcatcaagctgcccaagtactccctgttcgagctggagaacggccggaagcggatgctggcctccgccggcgagctgcagaagggcaacgagctggccctgccctccaagtacgtgaacttcctgtacctggcctcccactacgagaagctgaagggctcccccgaggacaacgagcagaagcagctgttcgtggagcagcacaagcactacctggacgagatcatcgagcagatctccgagttctccaagcgggtgatcctggccgacgccaacctggacaaggtgctgtccgcctacaacaagcaccgggacaagcccatccgggagcaggccgagaacatcatccacctgttcaccctgaccaacctgggcgcccccgccgccttcaagtacttcgacaccaccatcgaccggaagcggtacacctccaccaaggaggtgctggacgccaccctgatccaccagtccatcaccggcctgtacgagacccggatcgacctgtcccagctgggcggcgactccggcggctcctccggcggctccaagcggaccgccgacggctccgagttcgagtcccccaagaagaagcggaaggtgtccggcggctcctccggcggctccatggactccaccaaggagaagtgcgactcctacaaggacgacctgctgctgcggatgggcctgaacgacaacaaggccggcatggagggcctggacaaggagaagatcaacaagatcatcatggaggccaccaagggctcccggttctacggcaacgagctgaagaaggagaagcaggtgaaccagcggatcgagaacatgatgcagcagaaggcccagatcacctcccagcagctgcggaaggcccagctgcaggtggaccggttcgccatggagctggagcagtcccggaacctgtccaacaccatcgtgcacatcgacatggacgccttctacgccgccgtggagatgcgggacaaccccgagctgaaggacaagcccatcgccgtgggctccatgtccatgctgtccacctccaactaccacgcccggcggttcggcgtgcgggccgccatgcccggcttcatcgccaagcggctgtgcccccagctgatcatcgtgccccccaacttcgacaagtaccgggccgtgtccaaggaggtgaaggagatcctggccgactacgaccccaacttcatggccatgtccctggacgaggcctacctgaacatcaccaagcacctggaggagcggcagaactggcccgaggacaagcggcggtacttcatcaagatgggctcctccgtggagaacgacaaccccggcaaggaggtgaacaagctgtccgagcacgagcggtccatctcccccctgctgttcgaggagtccccctccgacgtgcagccccccggcgaccccttccaggtgaacttcgaggagcagaacaacccccagatcctgcagaactccgtggtgttcggcacctccgcccaggaggtggtgaaggagatccggttccggatcgagcagaagaccaccctgaccgcctccgccggcatcgcccccaacaccatgctggccaaggtgtgctccgacaagaacaagcccaacggccagtaccagatcctgcccaaccggcaggccgtgatggacttcatcaaggacctgcccatccggaaggtgtccggcatcggcaaggtgaccgagaagatgctgaaggccctgggcatcatcacctgcaccgagctgtaccagcagcgggccctgctgtccctgctgttctccgagacctcctggcactacttcctgcacatctccctgggcctgggctccacccacctgacccgggaccgggtgcggaagtccatgtccgtggagcggaccttctccgagatcaacaaggccgaggagcagtactccctgtgccaggagctgtgctccgagctggcccaggacctgcagaaggagcggctgaagggccggaccgtgaccatcaagctgaagaacgtgaacttcgaggtgaagacccgggcctccaccgtgtcctccgtggtgtccaccgccgaggagatcttcgccatcgccaaggagctgctgaagaccgagatcgacgccgacttcccccaccccctgcggctgcggctgatgggcgtgcggatctcctccttccccaacgaggaggaccggaagcaccagcagggcggcggctccggcaagcggaccgccgacggctccggcggcggctcccccaagaagaagcggaaggtgtagctagcaccagcctcaagaacacccgaatggagtctctaagctacataataccaacttacactttacaaaatgttgtcccccaaaatgtagccattcgtatctgctcctaataaaaagaaagtttcttcacattctctcgagaaaaaaaaaaaatggaaaaaaaaaaaacggaaaaaaaaaaaaggtaaaaaaaaaaaatataaaaaaaaaaaacataaaaaaaaaaaacgaaaaaaaaaaaacgtaaaaaaaaaaaactcaaaaaaaaaaaagataaaaaaaaaaaacctaaaaaaaaaaaatgtaaaaaaaaaaaagggaaaaaaaaaaaacgcaaaaaaaaaaaacacaaaaaaaaaaaatgcaaaaaaaaaaaatcgaaaaaaaaaaaatctaaaaaaaaaaaacgaaaaaaaaaaaacccaaaaaaaaaaaagacaaaaaaaaaaaatagaaaaaaaaaaagttaaaaaaaaaaaactgaaaaaaaaaaaatttaaaaaaaaaaaatctag

SEQ ID NO: 2658 - DNA, 6469 bp, synthetic construct
  misc_feature 1..6469: note = Synthetic
  source 1..6469: mol_type = other DNA
aggaagctcagaataaacgctcaactttggccggatctgccaccatgaagcggaccgccgacggctccgagttcgagtcccccaagaagaagcggaaggtggacaagaagtactccatcggcctggacatcggcaccaactccgtgggctgggccgtgatcaccgacgagtacaaggtgccctccaagaagttcaaggtgctgggcaacaccgaccggcactccatcaagaagaacctgatcggcgccctgctgttcgactccggcgagaccgccgaggccacccggctgaagcggaccgcccggcggcggtacacccggcggaagaaccggatctgctacctgcaggagatcttctccaacgagatggccaaggtggacgactccttcttccaccggctggaggagtccttcctggtggaggaggacaagaagcacgagcggcaccccatcttcggcaacatcgtggacgaggtggcctaccacgagaagtaccccaccatctaccacctgcggaagaagctggtggactccaccgacaaggccgacctgcggctgatctacctggccctggcccacatgatcaagttccggggccacttcctgatcgagggcgacctgaaccccgacaactccgacgtggacaagctgttcatccagctggtgcagacctacaaccagctgttcgaggagaaccccatcaacgcctccggcgtggacgccaaggccatcctgtccgcccggctgtccaagtcccggcggctggagaacctgatcgcccagctgcccggcgagaagaagaacggcctgttcggcaacctgatcgccctgtccctgggcctgacccccaacttcaagtccaacttcgacctggccgaggacgccaagctgcagctgtccaaggacacctacgacgacgacctggacaacctgctggcccagatcggcgaccagtacgccgacctgttcctggccgccaagaacctgtccgacgccatcctgctgtccgacatcctgcgggtgaacaccgagatcaccaaggcccccctgtccgcctccatgatcaagcggtacgacgagcaccaccaggacctgaccctgctgaaggccctggtgcggcagcagctgcccgagaagtacaaggagatcttcttcgaccagtccaagaacggctacgccggctacatcgacggcggcgcctcccaggaggagttctacaagttcatcaagcccatcctggagaagatggacggcaccgaggagctgctggtgaagctgaaccgggaggacctgctgcggaagcagcggaccttcgacaacggctccatcccccaccagatccacctgggcgagctgcacgccatcctgcggcggcaggaggacttctaccccttcctgaaggacaaccgggagaagatcgagaagatcctgaccttccggatcccctactacgtgggccccctggcccggggcaactcccggttcgcctggatgacccggaagtccgaggagaccatcaccccctggaacttcgaggaggtggtggacaagggcgcctccgcccagtccttcatcgagcggatgaccaacttcgacaagaacctgcccaacgagaaggtgctgcccaagcactccctgctgtacgagtacttcaccgtgtacaacgagctgaccaaggtgaagtacgtgaccgagggcatgcggaagcccgccttcctgtccggcgagcagaagaaggccatcgtggacctgctgttcaagaccaaccggaaggtgaccgtgaagcagctgaaggaggactacttcaagaagatcgagtgcttcgactccgtggagatctccggcgtggaggaccggttcaacgcctccctgggcacctaccacgacctgctgaagatcatcaaggacaaggacttcctggacaacgaggagaacgaggacatcctggaggacatcgtgctgaccctgaccctgttcgaggaccgggagatgatcgaggagcggctgaagacctacgcccacctgttcgacgacaaggtgatgaagcagctgaagcggcggcggtacaccggctggggccggctgtcccggaagctgatcaacggcatccgggacaagcagtccggcaagaccatcctggacttcctgaagtccgacggcttcgccaaccggaacttcatgcagctgatccacgacgactccctgaccttcaaggaggacatccagaaggcccaggtgtccggccagggcgactccctgcacgagcacatcgccaacctggccggctcccccgccatcaagaagggcatcctgcagaccgtgaaggtggtggacgagctggtgaaggtgatgggccggcacaagcccgagaacatcgtgatcgagatggcccgggagaaccagaccacccagaagggccagaagaactcccgggagcggatgaagcggatcgaggagggcatcaaggagctgggctcccagatcctgaaggagcaccccgtggagaacacccagctgcagaacgagaagctgtacctgtactacctgcagaacggccgggacatgtacgtggaccaggagctggacatcaaccggctgtccgactacgacgtggaccaaatcgtgccccagtccttcctgaaggacgactccatcgacaacaaggtgctgacccggtccgacaagaaccggggcaagtccgacaacgtgccctccgaggaggtggtgaagaagatgaagaactactggcggcagctgctgaacgccaagctgatcacccagcggaagttcgacaacctgaccaaggccgagcggggcggcctgtccgagctggacaaggccggcttcatcaagcggcagctggtggagacccggcagatcaccaagcacgtggcccagatcctggactcccggatgaacaccaagtacgacgagaacgacaagctgatccgggaggtgaaggtgatcaccctgaagtccaagctggtgtccgacttccggaaggacttccagttctacaaggtgcgggagatcaacaactaccaccacgcccacgacgcctacctgaacgccgtggtgggcaccgccctgatcaagaagtaccccaagctggagtccgagttcgtgtacggcgactacaaggtgtacgacgtgcggaagatgatcgccaagtccgagcaggagatcggcaaggccaccgccaagtacttcttctactccaacatcatgaacttcttcaagaccgagatcaccctggccaacggcgagatccggaagcggcccctgatcgagaccaacggcgagaccggcgagatcgtgtgggacaagggccgggacttcgccaccgtgcggaaggtgctgtccatgccccaggtgaacatcgtgaagaagaccgaggtgcagaccggcggcttctccaaggagtccatcctgcccaagcggaactccgacaagctgatcgcccggaagaaggactgggaccccaagaagtacggcggcttcgactcccccaccgtggcctactccgtgctggtggtggccaaggtggagaagggcaagtccaagaagctgaagtccgtgaaggagctgctgggcatcaccatcatggagcggtcctccttcgagaagaaccccatcgacttcctggaggccaagggctacaaggaggtgaagaaggacctgatcatcaagctgcccaagtactccctgttcgagctggagaacggccggaagcggatgctggcctccgccggcgagctgcagaagggcaacgagctggccctgccctccaagtacgtgaacttcctgtacctggcctcccactacgagaagctgaagggctcccccgaggacaacgagcagaagcagctgttcgtggagcagcacaagcactacctggacgagatcatcgagcagatctccgagttctccaagcgggtgatcctggccgacgccaacctggacaaggtgctgtccgcctacaacaagcaccgggacaagcccatccgggagcaggccgagaacatcatccacctgttcaccctgaccaacctgggcgcccccgccgccttcaagtacttcgacaccaccatcgaccggaagcggtacacctccaccaaggaggtgctggacgccaccctgatccaccagtccatcaccggcctgtacgagacccggatcgacctgtcccagctgggcggcgactccggcggctcctccggcggctccaagcggaccgccgacggctccgagttcgagtcccccaagaagaagcggaaggtgtccggcggctcctccggcggctccatggactccaccaaggagaagtgcgactcctacaaggacgacctgctgctgcggatgggcctgaacgacaacaaggccggcatggagggcctggacaaggagaagatcaacaagatcatcatggaggccaccaagggctcccggttctacggcaacgagctgaagaaggagaagcaggtgaaccagcggatcgagaacatgatgcagcagaaggcccagatcacctcccagcagctgcggaaggcccagctgcaggtggaccggttcgccatggagctggagcagtcccggaacctgtccaacaccatcgtgcacatcgacatggacgccttctacgccgccgtggagatgcgggacaaccccgagctgaaggacaagcccatcgccgtgggctccatgtccatgctgtccacctccaactaccacgcccggcggttcggcgtgcgggccgccatgcccggcttcatcgccaagcggctgtgcccccagctgatcatcgtgccccccaacttcgacaagtaccgggccgtgtccaaggaggtgaaggagatcctggccgactacgaccccaacttcatggccatgtccctggacgaggcctacctgaacatcaccaagcacctggaggagcggcagaactggcccgaggacaagcggcggtacttcatcaagatgggctcctccgtggagaacgacaaccccggcaaggaggtgaacaagctgtccgagcacgagcggtccatctcccccctgctgttcgaggagtccccctccgacgtgcagccccccggcgaccccttccaggtgaacttcgaggagcagaacaacccccagatcctgcagaactccgtggtgttcggcacctccgcccaggaggtggtgaaggagatccggttccggatcgagcagaagaccaccctgaccgcctccgccggcatcgcccccaacaccatgctggccaaggtgtgctccgacaagaacaagcccaacggccagtaccagatcctgcccaaccggcaggccgtgatggacttcatcaaggacctgcccatccggaaggtgtccggcatcggcaaggtgaccgagaagatgctgaaggccctgggcatcatcacctgcaccgagctgtaccagcagcgggccctgctgtccctgctgttctccgagacctcctggcactacttcctgcacatctccctgggcctgggctccacccacctgacccgggaccgggtgcggaagtccatgtccgtggagcggaccttctccgagatcaacaaggccgaggagcagtactccctgtgccaggagctgtgctccgagctggcccaggacctgcagaaggagcggctgaagggccggaccgtgaccatcaagctgaagaacgtgaacttcgaggtgaagacccgggcctccaccgtgtcctccgtggtgtccaccgccgaggagatcttcgccatcgccaaggagctgctgaagaccgagatcgacgccgacttcccccaccccctgcggctgcggctgatgggcgtgcggatctcctccttccccaacgaggaggaccggaagcaccagcagggcggcggctccggcaagcggaccgccgacggctccggcggcggctcccccaagaagaagcggaaggtgtagctagcaccagcctcaagaacacccgaatggagtctctaagctacataataccaacttacactttacaaaatgttgtcccccaaaatgtagccattcgtatctgctcctaataaaaagaaagtttcttcacattctctcgagaaaaaaaaaaaatggaaaaaaaaaaaacggaaaaaaaaaaaaggtaaaaaaaaaaaatataaaaaaaaaaaacataaaaaaaaaaaacgaaaaaaaaaaaacgtaaaaaaaaaaaactcaaaaaaaaaaaagataaaaaaaaaaaacctaaaaaaaaaaaatgtaaaaaaaaaaaagggaaaaaaaaaaaacgcaaaaaaaaaaaacacaaaaaaaaaaaatgcaaaaaaaaaaaatcgaaaaaaaaaaaatctaaaaaaaaaaaacgaaaaaaaaaaaacccaaaaaaaaaaaagacaaaaaaaaaaaatagaaaaaaaaaaagttaaaaaaaaaaaactgaaaaaaaaaaaatttaaaaaaaaaaaatctag

SEQ ID NO: 2659 - DNA, 6469 bp, synthetic construct
  misc_feature 1..6469: note = Synthetic
  source 1..6469: mol_type = other DNA
aggaagctcagaataaacgctcaactttggccggatctgccaccatgaagcggaccgccgacggctccgagttcgagtcccccaagaagaagcggaaggtggacaagaagtactccatcggcctggacatcggcaccaactccgtgggctgggccgtgatcaccgacgagtacaaggtgccctccaagaagttcaaggtgctgggcaacaccgaccggcactccatcaagaagaacctgatcggcgccctgctgttcgactccggcgagaccgccgaggccacccggctgaagcggaccgcccggcggcggtacacccggcggaagaaccggatctgctacctgcaggagatcttctccaacgagatggccaaggtggacgactccttcttccaccggctggaggagtccttcctggtggaggaggacaagaagcacgagcggcaccccatcttcggcaacatcgtggacgaggtggcctaccacgagaagtaccccaccatctaccacctgcggaagaagctggtggactccaccgacaaggccgacctgcggctgatctacctggccctggcccacatgatcaagttccggggccacttcctgatcgagggcgacctgaaccccgacaactccgacgtggacaagctgttcatccagctggtgcagacctacaaccagctgttcgaggagaaccccatcaacgcctccggcgtggacgccaaggccatcctgtccgcccggctgtccaagtcccggcggctggagaacctgatcgcccagctgcccggcgagaagaagaacggcctgttcggcaacctgatcgccctgtccctgggcctgacccccaacttcaagtccaacttcgacctggccgaggacgccaagctgcagctgtccaaggacacctacgacgacgacctggacaacctgctggcccagatcggcgaccagtacgccgacctgttcctggccgccaagaacctgtccgacgccatcctgctgtccgacatcctgcgggtgaacaccgagatcaccaaggcccccctgtccgcctccatgatcaagcggtacgacgagcaccaccaggacctgaccctgctgaaggccctggtgcggcagcagctgcccgagaagtacaaggagatcttcttcgaccagtccaagaacggctacgccggctacatcgacggcggcgcctcccaggaggagttctacaagttcatcaagcccatcctggagaagatggacggcaccgaggagctgctggtgaagctgaaccgggaggacctgctgcggaagcagcggaccttcgacaacggctccatcccccaccagatccacctgggcgagctgcacgccatcctgcggcggcaggaggacttctaccccttcctgaaggacaaccgggagaagatcgagaagatcctgaccttccggatcccctactacgtgggccccctggcccggggcaactcccggttcgcctggatgacccggaagtccgaggagaccatcaccccctggaacttcgaggaggtggtggacaagggcgcctccgcccagtccttcatcgagcggatgaccaacttcgacaagaacctgcccaacgagaaggtgctgcccaagcactccctgctgtacgagtacttcaccgtgtacaacgagctgaccaaggtgaagtacgtgaccgagggcatgcggaagcccgccttcctgtccggcgagcagaagaaggccatcgtggacctgctgttcaagaccaaccggaaggtgaccgtgaagcagctgaaggaggactacttcaagaagatcgagtgcttcgactccgtggagatctccggcgtggaggaccggttcaacgcctccctgggcacctaccacgacctgctgaagatcatcaaggacaaggacttcctggacaacgaggagaacgaggacatcctggaggacatcgtgctgaccctgaccctgttcgaggaccgggagatgatcgaggagcggctgaagacctacgcccacctgttcgacgacaaggtgatgaagcagctgaagcggcggcggtacaccggctggggccggctgtcccggaagctgatcaacggcatccgggacaagcagtccggcaagaccatcctggacttcctgaagtccgacggcttcgccaaccggaacttcatgcagctgatccacgacgactccctgaccttcaaggaggacatccagaaggcccaggtgtccggccagggcgactccctgcacgagcacatcgccaacctggccggctcccccgccatcaagaagggcatcctgcagaccgtgaaggtggtggacgagctggtgaaggtgatgggccggcacaagcccgagaacatcgtgatcgagatggcccgggagaaccagaccacccagaagggccagaagaactcccgggagcggatgaagcggatcgaggagggcatcaaggagctgggctcccagatcctgaaggagcaccccgtggagaacacccagctgcagaacgagaagctgtacctgtactacctgcagaacggccgggacatgtacgtggaccaggagctggacatcaaccggctgtccgactacgacgtggaccgcatcgtgccccagtccttcctgaaggacgactccatcgacaacaaggtgctgacccggtccgacaagaaccggggcaagtccgacaacgtgccctccgaggaggtggtgaagaagatgaagaactactggcggcagctgctgaacgccaagctgatcacccagcggaagttcgacaacctgaccaaggccgagcggggcggcctgtccgagctggacaaggccggcttcatcaagcggcagctggtggagacccggcagatcaccaagcacgtggcccagatcctggactcccggatgaacaccaagtacgacgagaacgacaagctgatccgggaggtgaaggtgatcaccctgaagtccaagctggtgtccgacttccggaaggacttccagttctacaaggtgcgggagatcaacaactaccaccacgcccacgacgcctacctgaacgccgtggtgggcaccgccctgatcaagaagtaccccaagctggagtccgagttcgtgtacggcgactacaaggtgtacgacgtgcggaagatgatcgccaagtccgagcaggagatcggcaaggccaccgccaagtacttcttctactccaacatcatgaacttcttcaagaccgagatcaccctggccaacggcgagatccggaagcggcccctgatcgagaccaacggcgagaccggcgagatcgtgtgggacaagggccgggacttcgccaccgtgcggaaggtgctgtccatgccccaggtgaacatcgtgaagaagaccgaggtgcagaccggcggcttctccaaggagtccatcctgcccaagcggaactccgacaagctgatcgcccggaagaaggactgggaccccaagaagtacggcggcttcgactcccccaccgtggcctactccgtgctggtggtggccaaggtggagaagggcaagtccaagaagctgaagtccgtgaaggagctgctgggcatcaccatcatggagcggtcctccttcgagaagaaccccatcgacttcctggaggccaagggctacaaggaggtgaagaaggacctgatcatcaagctgcccaagtactccctgttcgagctggagaacggccggaagcggatgctggcctccgccggcgagctgcagaagggcaacgagctggccctgccctccaagtacgtgaacttcctgtacctggcctcccactacgagaagctgaagggctcccccgaggacaacgagcagaagcagctgttcgtggagcagcacaagcactacctggacgagatcatcgagcagatctccgagttctccaagcgggtgatcctggccgacgccaacctggacaaggtgctgtccgcctacaacaagcaccgggacaagcccatccgggagcaggccgagaacatcatccacctgttcaccctgaccaacctgggcgcccccgccgccttcaagtacttcgacaccaccatcgaccggaagcggtacacctccaccaaggaggtgctggacgccaccctgatccaccagtccatcaccggcctgtacgagacccggatcgacctgtcccagctgggcggcgactccggcggctcctccggcggctccaagcggaccgccgacggctccgagttcgagtcccccaagaagaagcggaaggtgtccggcggctcctccggcggctccatggactccaccaaggagaagtgcgactcctacaaggacgacctgctgctgcggatgggcctgaacgacaacaaggccggcatggagggcctggacaaggagaagatcaacaagatcatcatggaggccaccaagggctcccggttctacggcaacgagctgaagaaggagaagcaggtgaaccagcggatcgagaacatgatgcagcagaaggcccagatcacctcccagcagctgcggaaggcccagctgcaggtggaccggttcgccatggagctggagcagtcccggaacctgtccaacaccatcgtgcacatcgacatggacgccttctacgccgccgtggagatgcgggacaaccccgagctgaaggacaagcccatcgccgtgggctccatgtccatgctgtccacctccaactaccacgcccggcggttcggcgtgcgggccgccatgcccggcttcatcgccaagcggctgtgcccccagctgatcatcgtgccccccaacttcgacaagtaccgggccgtgtccaaggaggtgaaggagatcctggccgactacgaccccaacttcatggccatgtccctggacgaggcctacctgaacatcaccaagcacctggaggagcggcagaactggcccgaggacaagcggcggtacttcatcaagatgggctcctccgtggagaacgacaaccccggcaaggaggtgaacaagctgtccgagcacgagcggtccatctcccccctgctgttcgaggagtccccctccgacgtgcagccccccggcgaccccttccaggtgaacttcgaggagcagaacaacccccagatcctgcagaactccgtggtgttcggcacctccgcccaggaggtggtgaaggagatccggttccggatcgagcagaagaccaccctgaccgcctccgccggcatcgcccccaacaccatgctggccaaggtgtgctccgacaagaacaagcccaacggccagtaccagatcctgcccaaccggcaggccgtgatggacttcatcaaggacctgcccatccggaaggtgtccggcatcggcaaggtgaccgagaagatgctgaaggccctgggcatcatcacctgcaccgagctgtaccagcagcgggccctgctgtccctgctgttctccgagacctcctggcactacttcctgcacatctccctgggcctgggctccacccacctgacccgggaccgggtgcggaagtccatgtccgtggagcggaccttctccgagatcaacaaggccgaggagcagtactccctgtgccaggagctgtgctccgagctggcccaggacctgcagaaggagcggctgaagggccggaccgtgaccatcaagctgaagaacgtgaacttcgaggtgaagacccgggcctccaccgtgtcctccgtggtgtccaccgccgaggagatcttcgccatcgccaaggagctgctgaagaccgagatcgacgccgacttcccccaccccctgcggctgcggctgatgggcgtgcggatctcctccttccccaacgaggaggaccggaagcaccagcagggcggcggctccggcaagcggaccgccgacggctccggcggcggctcccccaagaagaagcggaaggtgtagctagcaccagcctcaagaacacccgaatggagtctctaagctacataataccaacttacactttacaaaatgttgtcccccaaaatgtagccattcgtatctgctcctaataaaaagaaagtttcttcacattctctcgagaaaaaaaaaaaatggaaaaaaaaaaaacggaaaaaaaaaaaaggtaaaaaaaaaaaatataaaaaaaaaaaacataaaaaaaaaaaacgaaaaaaaaaaaacgtaaaaaaaaaaaactcaaaaaaaaaaaagataaaaaaaaaaaacctaaaaaaaaaaaatgtaaaaaaaaaaaagggaaaaaaaaaaaacgcaaaaaaaaaaaacacaaaaaaaaaaaatgcaaaaaaaaaaaatcgaaaaaaaaaaaatctaaaaaaaaaaaacgaaaaaaaaaaaacccaaaaaaaaaaaagacaaaaaaaaaaaatagaaaaaaaaaaagttaaaaaaaaaaaactgaaaaaaaaaaaatttaaaaaaaaaaaatctag

SEQ ID NO: 2660 - DNA, 6469 bp, synthetic construct
  misc_feature 1..6469: note = Synthetic
  source 1..6469: mol_type = other DNA
aggaagctcagaataaacgctcaactttggccggatctgccaccatgaagcggaccgccgacggctccgagttcgagtcccccaagaagaagcggaaggtggacaagaagtactccatcggcctggacatcggcaccaactccgtgggctgggccgtgatcaccgacgagtacaaggtgccctccaagaagttcaaggtgctgggcaacaccgaccggcactccatcaagaagaacctgatcggcgccctgctgttcgactccggcgagaccgccgaggccacccggctgaagcggaccgcccggcggcggtacacccggcggaagaaccggatctgctacctgcaggagatcttctccaacgagatggccaaggtggacgactccttcttccaccggctggaggagtccttcctggtggaggaggacaagaagcacgagcggcaccccatcttcggcaacatcgtggacgaggtggcctaccacgagaagtaccccaccatctaccacctgcggaagaagctggtggactccaccgacaaggccgacctgcggctgatctacctggccctggcccacatgatcaagttccggggccacttcctgatcgagggcgacctgaaccccgacaactccgacgtggacaagctgttcatccagctggtgcagacctacaaccagctgttcgaggagaaccccatcaacgcctccggcgtggacgccaaggccatcctgtccgcccggctgtccaagtcccggcggctggagaacctgatcgcccagctgcccggcgagaagaagaacggcctgttcggcaacctgatcgccctgtccctgggcctgacccccaacttcaagtccaacttcgacctggccgaggacgccaagctgcagctgtccaaggacacctacgacgacgacctggacaacctgctggcccagatcggcgaccagtacgccgacctgttcctggccgccaagaacctgtccgacgccatcctgctgtccgacatcctgcgggtgaacaccgagatcaccaaggcccccctgtccgcctccatgatcaagcggtacgacgagcaccaccaggacctgaccctgctgaaggccctggtgcggcagcagctgcccgagaagtacaaggagatcttcttcgaccagtccaagaacggctacgccggctacatcgacggcggcgcctcccaggaggagttctacaagttcatcaagcccatcctggagaagatggacggcaccgaggagctgctggtgaagctgaaccgggaggacctgctgcggaagcagcggaccttcgacaacggctccatcccccaccagatccacctgggcgagctgcacgccatcctgcggcggcaggaggacttctaccccttcctgaaggacaaccgggagaagatcgagaagatcctgaccttccggatcccctactacgtgggccccctggcccggggcaactcccggttcgcctggatgacccggaagtccgaggagaccatcaccccctggaacttcgaggaggtggtggacaagggcgcctccgcccagtccttcatcgagcggatgaccaacttcgacaagaacctgcccaacgagaaggtgctgcccaagcactccctgctgtacgagtacttcaccgtgtacaacgagctgaccaaggtgaagtacgtgaccgagggcatgcggaagcccgccttcctgtccggcgagcagaagaaggccatcgtggacctgctgttcaagaccaaccggaaggtgaccgtgaagcagctgaaggaggactacttcaagaagatcgagtgcttcgactccgtggagatctccggcgtggaggaccggttcaacgcctccctgggcacctaccacgacctgctgaagatcatcaaggacaaggacttcctggacaacgaggagaacgaggacatcctggaggacatcgtgctgaccctgaccctgttcgaggaccgggagatgatcgaggagcggctgaagacctacgcccacctgttcgacgacaaggtgatgaagcagctgaagcggcggcggtacaccggctggggccggctgtcccggaagctgatcaacggcatccgggacaagcagtccggcaagaccatcctggacttcctgaagtccgacggcttcgccaaccggaacttcatgcagctgatccacgacgactccctgaccttcaaggaggacatccagaaggcccaggtgtccggccagggcgactccctgcacgagcacatcgccaacctggccggctcccccgccatcaagaagggcatcctgcagaccgtgaaggtggtggacgagctggtgaaggtgatgggccggcacaagcccgagaacatcgtgatcgagatggcccgggagaaccagaccacccagaagggccagaagaactcccgggagcggatgaagcggatcgaggagggcatcaaggagctgggctcccagatcctgaaggagcaccccgtggagaacacccagctgcagaacgagaagctgtacctgtactacctgcagaacggccgggacatgtacgtggaccaggagctggacatcaaccggctgtccgactacgacgtggacaccatcgtgccccagtccttcctgaaggacgactccatcgacaacaaggtgctgacccggtccgacaagaaccggggcaagtccgacaacgtgccctccgaggaggtggtgaagaagatgaagaactactggcggcagctgctgaacgccaagctgatcacccagcggaagttcgacaacctgaccaaggccgagcggggcggcctgtccgagctggacaaggccggcttcatcaagcggcagctggtggagacccggcagatcaccaagcacgtggcccagatcctggactcccggatgaacaccaagtacgacgagaacgacaagctgatccgggaggtgaaggtgatcaccctgaagtccaagctggtgtccgacttccggaaggacttccagttctacaaggtgcgggagatcaacaactaccaccacgcccacgacgcctacctgaacgccgtggtgggcaccgccctgatcaagaagtaccccaagctggagtccgagttcgtgtacggcgactacaaggtgtacgacgtgcggaagatgatcgccaagtccgagcaggagatcggcaaggccaccgccaagtacttcttctactccaacatcatgaacttcttcaagaccgagatcaccctggccaacggcgagatccggaagcggcccctgatcgagaccaacggcgagaccggcgagatcgtgtgggacaagggccgggacttcgccaccgtgcggaaggtgctgtccatgccccaggtgaacatcgtgaagaagaccgaggtgcagaccggcggcttctccaaggagtccatcctgcccaagcggaactccgacaagctgatcgcccggaagaaggactgggaccccaagaagtacggcggcttcgactcccccaccgtggcctactccgtgctggtggtggccaaggtggagaagggcaagtccaagaagctgaagtccgtgaaggagctgctgggcatcaccatcatggagcggtcctccttcgagaagaaccccatcgacttcctggaggccaagggctacaaggaggtgaagaaggacctgatcatcaagctgcccaagtactccctgttcgagctggagaacggccggaagcggatgctggcctccgccggcgagctgcagaagggcaacgagctggccctgccctccaagtacgtgaacttcctgtacctggcctcccactacgagaagctgaagggctcccccgaggacaacgagcagaagcagctgttcgtggagcagcacaagcactacctggacgagatcatcgagcagatctccgagttctccaagcgggtgatcctggccgacgccaacctggacaaggtgctgtccgcctacaacaagcaccgggacaagcccatccgggagcaggccgagaacatcatccacctgttcaccctgaccaacctgggcgcccccgccgccttcaagtacttcgacaccaccatcgaccggaagcggtacacctccaccaaggaggtgctggacgccaccctgatccaccagtccatcaccggcctgtacgagacccggatcgacctgtcccagctgggcggcgactccggcggctcctccggcggctccaagcggaccgccgacggctccgagttcgagtcccccaagaagaagcggaaggtgtccggcggctcctccggcggctccatggactccaccaaggagaagtgcgactcctacaaggacgacctgctgctgcggatgggcctgaacgacaacaaggccggcatggagggcctggacaaggagaagatcaacaagatcatcatggaggccaccaagggctcccggttctacggcaacgagctgaagaaggagaagcaggtgaaccagcggatcgagaacatgatgcagcagaaggcccagatcacctcccagcagctgcggaaggcccagctgcaggtggaccggttcgccatggagctggagcagtcccggaacctgtccaacaccatcgtgcacatcgacatggacgccttctacgccgccgtggagatgcgggacaaccccgagctgaaggacaagcccatcgccgtgggctccatgtccatgctgtccacctccaactaccacgcccggcggttcggcgtgcgggccgccatgcccggcttcatcgccaagcggctgtgcccccagctgatcatcgtgccccccaacttcgacaagtaccgggccgtgtccaaggaggtgaaggagatcctggccgactacgaccccaacttcatggccatgtccctggacgaggcctacctgaacatcaccaagcacctggaggagcggcagaactggcccgaggacaagcggcggtacttcatcaagatgggctcctccgtggagaacgacaaccccggcaaggaggtgaacaagctgtccgagcacgagcggtccatctcccccctgctgttcgaggagtccccctccgacgtgcagccccccggcgaccccttccaggtgaacttcgaggagcagaacaacccccagatcctgcagaactccgtggtgttcggcacctccgcccaggaggtggtgaaggagatccggttccggatcgagcagaagaccaccctgaccgcctccgccggcatcgcccccaacaccatgctggccaaggtgtgctccgacaagaacaagcccaacggccagtaccagatcctgcccaaccggcaggccgtgatggacttcatcaaggacctgcccatccggaaggtgtccggcatcggcaaggtgaccgagaagatgctgaaggccctgggcatcatcacctgcaccgagctgtaccagcagcgggccctgctgtccctgctgttctccgagacctcctggcactacttcctgcacatctccctgggcctgggctccacccacctgacccgggaccgggtgcggaagtccatgtccgtggagcggaccttctccgagatcaacaaggccgaggagcagtactccctgtgccaggagctgtgctccgagctggcccaggacctgcagaaggagcggctgaagggccggaccgtgaccatcaagctgaagaacgtgaacttcgaggtgaagacccgggcctccaccgtgtcctccgtggtgtccaccgccgaggagatcttcgccatcgccaaggagctgctgaagaccgagatcgacgccgacttcccccaccccctgcggctgcggctgatgggcgtgcggatctcctccttccccaacgaggaggaccggaagcaccagcagggcggcggctccggcaagcggaccgccgacggctccggcggcggctcccccaagaagaagcggaaggtgtagctagcaccagcctcaagaacacccgaatggagtctctaagctacataataccaacttacactttacaaaatgttgtcccccaaaatgtagccattcgtatctgctcctaataaaaagaaagtttcttcacattctctcgagaaaaaaaaaaaatggaaaaaaaaaaaacggaaaaaaaaaaaaggtaaaaaaaaaaaatataaaaaaaaaaaacataaaaaaaaaaaacgaaaaaaaaaaaacgtaaaaaaaaaaaactcaaaaaaaaaaaagataaaaaaaaaaaacctaaaaaaaaaaaatgtaaaaaaaaaaaagggaaaaaaaaaaaacgcaaaaaaaaaaaacacaaaaaaaaaaaatgcaaaaaaaaaaaatcgaaaaaaaaaaaatctaaaaaaaaaaaacgaaaaaaaaaaaacccaaaaaaaaaaaagacaaaaaaaaaaaatagaaaaaaaaaaagttaaaaaaaaaaaactgaaaaaaaaaaaatttaaaaaaaaaaaatctag

SEQ ID NO: 2661 - DNA, 6469 bp, synthetic construct
  misc_feature 1..6469: note = Synthetic
  source 1..6469: mol_type = other DNA
aggaagctcagaataaacgctcaactttggccggatctgccaccatgaagcggaccgccgacggctccgagttcgagtcccccaagaagaagcggaaggtggacaagaagtactccatcggcctggacatcggcaccaactccgtgggctgggccgtgatcaccgacgagtacaaggtgccctccaagaagttcaaggtgctgggcaacaccgaccggcactccatcaagaagaacctgatcggcgccctgctgttcgactccggcgagaccgccgaggccacccggctgaagcggaccgcccggcggcggtacacccggcggaagaaccggatctgctacctgcaggagatcttctccaacgagatggccaaggtggacgactccttcttccaccggctggaggagtccttcctggtggaggaggacaagaagcacgagcggcaccccatcttcggcaacatcgtggacgaggtggcctaccacgagaagtaccccaccatctaccacctgcggaagaagctggtggactccaccgacaaggccgacctgcggctgatctacctggccctggcccacatgatcaagttccggggccacttcctgatcgagggcgacctgaaccccgacaactccgacgtggacaagctgttcatccagctggtgcagacctacaaccagctgttcgaggagaaccccatcaacgcctccggcgtggacgccaaggccatcctgtccgcccggctgtccaagtcccggcggctggagaacctgatcgcccagctgcccggcgagaagaagaacggcctgttcggcaacctgatcgccctgtccctgggcctgacccccaacttcaagtccaacttcgacctggccgaggacgccaagctgcagctgtccaaggacacctacgacgacgacctggacaacctgctggcccagatcggcgaccagtacgccgacctgttcctggccgccaagaacctgtccgacgccatcctgctgtccgacatcctgcgggtgaacaccgagatcaccaaggcccccctgtccgcctccatgatcaagcggtacgacgagcaccaccaggacctgaccctgctgaaggccctggtgcggcagcagctgcccgagaagtacaaggagatcttcttcgaccagtccaagaacggctacgccggctacatcgacggcggcgcctcccaggaggagttctacaagttcatcaagcccatcctggagaagatggacggcaccgaggagctgctggtgaagctgaaccgggaggacctgctgcggaagcagcggaccttcgacaacggctccatcccccaccagatccacctgggcgagctgcacgccatcctgcggcggcaggaggacttctaccccttcctgaaggacaaccgggagaagatcgagaagatcctgaccttccggatcccctactacgtgggccccctggcccggggcaactcccggttcgcctggatgacccggaagtccgaggagaccatcaccccctggaacttcgaggaggtggtggacaagggcgcctccgcccagtccttcatcgagcggatgaccaacttcgacaagaacctgcccaacgagaaggtgctgcccaagcactccctgctgtacgagtacttcaccgtgtacaacgagctgaccaaggtgaagtacgtgaccgagggcatgcggaagcccgccttcctgtccggcgagcagaagaaggccatcgtggacctgctgttcaagaccaaccggaaggtgaccgtgaagcagctgaaggaggactacttcaagaagatcgagtgcttcgactccgtggagatctccggcgtggaggaccggttcaacgcctccctgggcacctaccacgacctgctgaagatcatcaaggacaaggacttcctggacaacgaggagaacgaggacatcctggaggacatcgtgctgaccctgaccctgttcgaggaccgggagatgatcgaggagcggctgaagacctacgcccacctgttcgacgacaaggtgatgaagcagctgaagcggcggcggtacaccggctggggccggctgtcccggaagctgatcaacggcatccgggacaagcagtccggcaagaccatcctggacttcctgaagtccgacggcttcgccaaccggaacttcatgcagctgatccacgacgactccctgaccttcaaggaggacatccagaaggcccaggtgtccggccagggcgactccctgcacgagcacatcgccaacctggccggctcccccgccatcaagaagggcatcctgcagaccgtgaaggtggtggacgagctggtgaaggtgatgggccggcacaagcccgagaacatcgtgatcgagatggcccgggagaaccagaccacccagaagggccagaagaactcccgggagcggatgaagcggatcgaggagggcatcaaggagctgggctcccagatcctgaaggagcaccccgtggagaacacccagctgcagaacgagaagctgtacctgtactacctgcagaacggccgggacatgtacgtggaccaggagctggacatcaaccggctgtccgactacgacgtggactacatcgtgccccagtccttcctgaaggacgactccatcgacaacaaggtgctgacccggtccgacaagaaccggggcaagtccgacaacgtgccctccgaggaggtggtgaagaagatgaagaactactggcggcagctgctgaacgccaagctgatcacccagcggaagttcgacaacctgaccaaggccgagcggggcggcctgtccgagctggacaaggccggcttcatcaagcggcagctggtggagacccggcagatcaccaagcacgtggcccagatcctggactcccggatgaacaccaagtacgacgagaacgacaagctgatccgggaggtgaaggtgatcaccctgaagtccaagctggtgtccgacttccggaaggacttccagttctacaaggtgcgggagatcaacaactaccaccacgcccacgacgcctacctgaacgccgtggtgggcaccgccctgatcaagaagtaccccaagctggagtccgagttcgtgtacggcgactacaaggtgtacgacgtgcggaagatgatcgccaagtccgagcaggagatcggcaaggccaccgccaagtacttcttctactccaacatcatgaacttcttcaagaccgagatcaccctggccaacggcgagatccggaagcggcccctgatcgagaccaacggcgagaccggcgagatcgtgtgggacaagggccgggacttcgccaccgtgcggaaggtgctgtccatgccccaggtgaacatcgtgaagaagaccgaggtgcagaccggcggcttctccaaggagtccatcctgcccaagcggaactccgacaagctgatcgcccggaagaaggactgggaccccaagaagtacggcggcttcgactcccccaccgtggcctactccgtgctggtggtggccaaggtggagaagggcaagtccaagaagctgaagtccgtgaaggagctgctgggcatcaccatcatggagcggtcctccttcgagaagaaccccatcgacttcctggaggccaagggctacaaggaggtgaagaaggacctgatcatcaagctgcccaagtactccctgttcgagctggagaacggccggaagcggatgctggcctccgccggcgagctgcagaagggcaacgagctggccctgccctccaagtacgtgaacttcctgtacctggcctcccactacgagaagctgaagggctcccccgaggacaacgagcagaagcagctgttcgtggagcagcacaagcactacctggacgagatcatcgagcagatctccgagttctccaagcgggtgatcctggccgacgccaacctggacaaggtgctgtccgcctacaacaagcaccgggacaagcccatccgggagcaggccgagaacatcatccacctgttcaccctgaccaacctgggcgcccccgccgccttcaagtacttcgacaccaccatcgaccggaagcggtacacctccaccaaggaggtgctggacgccaccctgatccaccagtccatcaccggcctgtacgagacccggatcgacctgtcccagctgggcggcgactccggcggctcctccggcggctccaagcggaccgccgacggctccgagttcgagtcccccaagaagaagcggaaggtgtccggcggctcctccggcggctccatggactccaccaaggagaagtgcgactcctacaaggacgacctgctgctgcggatgggcctgaacgacaacaaggccggcatggagggcctggacaaggagaagatcaacaagatcatcatggaggccaccaagggctcccggttctacggcaacgagctgaagaaggagaagcaggtgaaccagcggatcgagaacatgatgcagcagaaggcccagatcacctcccagcagctgcggaaggcccagctgcaggtggaccggttcgccatggagctggagcagtcccggaacctgtccaacaccatcgtgcacatcgacatggacgccttctacgccgccgtggagatgcgggacaaccccgagctgaaggacaagcccatcgccgtgggctccatgtccatgctgtccacctccaactaccacgcccggcggttcggcgtgcgggccgccatgcccggcttcatcgccaagcggctgtgcccccagctgatcatcgtgccccccaacttcgacaagtaccgggccgtgtccaaggaggtgaaggagatcctggccgactacgaccccaacttcatggccatgtccctggacgaggcctacctgaacatcaccaagcacctggaggagcggcagaactggcccgaggacaagcggcggtacttcatcaagatgggctcctccgtggagaacgacaaccccggcaaggaggtgaacaagctgtccgagcacgagcggtccatctcccccctgctgttcgaggagtccccctccgacgtgcagccccccggcgaccccttccaggtgaacttcgaggagcagaacaacccccagatcctgcagaactccgtggtgttcggcacctccgcccaggaggtggtgaaggagatccggttccggatcgagcagaagaccaccctgaccgcctccgccggcatcgcccccaacaccatgctggccaaggtgtgctccgacaagaacaagcccaacggccagtaccagatcctgcccaaccggcaggccgtgatggacttcatcaaggacctgcccatccggaaggtgtccggcatcggcaaggtgaccgagaagatgctgaaggccctgggcatcatcacctgcaccgagctgtaccagcagcgggccctgctgtccctgctgttctccgagacctcctggcactacttcctgcacatctccctgggcctgggctccacccacctgacccgggaccgggtgcggaagtccatgtccgtggagcggaccttctccgagatcaacaaggccgaggagcagtactccctgtgccaggagctgtgctccgagctggcccaggacctgcagaaggagcggctgaagggccggaccgtgaccatcaagctgaagaacgtgaacttcgaggtgaagacccgggcctccaccgtgtcctccgtggtgtccaccgccgaggagatcttcgccatcgccaaggagctgctgaagaccgagatcgacgccgacttcccccaccccctgcggctgcggctgatgggcgtgcggatctcctccttccccaacgaggaggaccggaagcaccagcagggcggcggctccggcaagcggaccgccgacggctccggcggcggctcccccaagaagaagcggaaggtgtagctagcaccagcctcaagaacacccgaatggagtctctaagctacataataccaacttacactttacaaaatgttgtcccccaaaatgtagccattcgtatctgctcctaataaaaagaaagtttcttcacattctctcgagaaaaaaaaaaaatggaaaaaaaaaaaacggaaaaaaaaaaaaggtaaaaaaaaaaaatataaaaaaaaaaaacataaaaaaaaaaaacgaaaaaaaaaaaacgtaaaaaaaaaaaactcaaaaaaaaaaaagataaaaaaaaaaaacctaaaaaaaaaaaatgtaaaaaaaaaaaagggaaaaaaaaaaaacgcaaaaaaaaaaaacacaaaaaaaaaaaatgcaaaaaaaaaaaatcgaaaaaaaaaaaatctaaaaaaaaaaaacgaaaaaaaaaaaacccaaaaaaaaaaaagacaaaaaaaaaaaatagaaaaaaaaaaagttaaaaaaaaaaaactgaaaaaaaaaaaatttaaaaaaaaaaaatctag

SEQ ID NO: 2662 - DNA, 6469 bp, synthetic construct
  misc_feature 1..6469: note = Synthetic
  source 1..6469: mol_type = other DNA
aggaagctcagaataaacgctcaactttggccggatctgccaccatgaagcggaccgccgacggctccgagttcgagtcccccaagaagaagcggaaggtggacaagaagtactccatcggcctggacatcggcaccaactccgtgggctgggccgtgatcaccgacgagtacaaggtgccctccaagaagttcaaggtgctgggcaacaccgaccggcactccatcaagaagaacctgatcggcgccctgctgttcgactccggcgagaccgccgaggccacccggctgaagcggaccgcccggcggcggtacacccggcggaagaaccggatctgctacctgcaggagatcttctccaacgagatggccaaggtggacgactccttcttccaccggctggaggagtccttcctggtggaggaggacaagaagcacgagcggcaccccatcttcggcaacatcgtggacgaggtggcctaccacgagaagtaccccaccatctaccacctgcggaagaagctggtggactccaccgacaaggccgacctgcggctgatctacctggccctggcccacatgatcaagttccggggccacttcctgatcgagggcgacctgaaccccgacaactccgacgtggacaagctgttcatccagctggtgcagacctacaaccagctgttcgaggagaaccccatcaacgcctccggcgtggacgccaaggccatcctgtccgcccggctgtccaagtcccggcggctggagaacctgatcgcccagctgcccggcgagaagaagaacggcctgttcggcaacctgatcgccctgtccctgggcctgacccccaacttcaagtccaacttcgacctggccgaggacgccaagctgcagctgtccaaggacacctacgacgacgacctggacaacctgctggcccagatcggcgaccagtacgccgacctgttcctggccgccaagaacctgtccgacgccatcctgctgtccgacatcctgcgggtgaacaccgagatcaccaaggcccccctgtccgcctccatgatcaagcggtacgacgagcaccaccaggacctgaccctgctgaaggccctggtgcggcagcagctgcccgagaagtacaaggagatcttcttcgaccagtccaagaacggctacgccggctacatcgacggcggcgcctcccaggaggagttctacaagttcatcaagcccatcctggagaagatggacggcaccgaggagctgctggtgaagctgaaccgggaggacctgctgcggaagcagcggaccttcgacaacggctccatcccccaccagatccacctgggcgagctgcacgccatcctgcggcggcaggaggacttctaccccttcctgaaggacaaccgggagaagatcgagaagatcctgaccttccggatcccctactacgtgggccccctggcccggggcaactcccggttcgcctggatgacccggaagtccgaggagaccatcaccccctggaacttcgaggaggtggtggacaagggcgcctccgcccagtccttcatcgagcggatgaccaacttcgacaagaacctgcccaacgagaaggtgctgcccaagcactccctgctgtacgagtacttcaccgtgtacaacgagctgaccaaggtgaagtacgtgaccgagggcatgcggaagcccgccttcctgtccggcgagcagaagaaggccatcgtggacctgctgttcaagaccaaccggaaggtgaccgtgaagcagctgaaggaggactacttcaagaagatcgagtgcttcgactccgtggagatctccggcgtggaggaccggttcaacgcctccctgggcacctaccacgacctgctgaagatcatcaaggacaaggacttcctggacaacgaggagaacgaggacatcctggaggacatcgtgctgaccctgaccctgttcgaggaccgggagatgatcgaggagcggctgaagacctacgcccacctgttcgacgacaaggtgatgaagcagctgaagcggcggcggtacaccggctggggccggctgtcccggaagctgatcaacggcatccgggacaagcagtccggcaagaccatcctggacttcctgaagtccgacggcttcgccaaccggaacttcatgcagctgatccacgacgactccctgaccttcaaggaggacatccagaaggcccaggtgtccggccagggcgactccctgcacgagcacatcgccaacctggccggctcccccgccatcaagaagggcatcctgcagaccgtgaaggtggtggacgagctggtgaaggtgatgggccggcacaagcccgagaacatcgtgatcgagatggcccgggagaaccagaccacccagaagggccagaagaactcccgggagcggatgaagcggatcgaggagggcatcaaggagctgggctcccagatcctgaaggagcaccccgtggagaacacccagctgcagaacgagaagctgtacctgtactacctgcagaacggccgggacatgtacgtggaccaggagctggacatcaaccggctgtccgactacgacgtggacgccatcgtgccccagtccttcctgaaggacgactccatcgacaacaaggtgctgacccggtccgacaagaaccggggcaagtccgacaacgtgccctccgaggaggtggtgaagaagatgaagaactactggcggcagctgctgaacgccaagctgatcacccagcggaagttcgacaacctgaccaaggccgagcggggcggcctgtccgagctggacaaggccggcttcatcaagcggcagctggtggagacccggcagatcaccaagcacgtggcccagatcctggactcccggatgaacaccaagtacgacgagaacgacaagctgatccgggaggtgaaggtgatcaccctgaagtccaagctggtgtccgacttccggaaggacttccagttctacaaggtgcgggagatcaacaactaccaccacgcccacgacgcctacctgaacgccgtggtgggcaccgccctgatcaagaagtaccccaagctggagtccgagttcgtgtacggcgactacaaggtgtacgacgtgcggaagatgatcgccaagtccgagcaggagatcggcaaggccaccgccaagtacttcttctactccaacatcatgaacttcttcaagaccgagatcaccctggccaacggcgagatccggaagcggcccctgatcgagaccaacggcgagaccggcgagatcgtgtgggacaagggccgggacttcgccaccgtgcggaaggtgctgtccatgccccaggtgaacatcgtgaagaagaccgaggtgcagaccggcggcttctccaaggagtccatcctgcccaagcggaactccgacaagctgatcgcccggaagaaggactgggaccccaagaagtacggcggcttcgactcccccaccgtggcctactccgtgctggtggtggccaaggtggagaagggcaagtccaagaagctgaagtccgtgaaggagctgctgggcatcaccatcatggagcggtcctccttcgagaagaaccccatcgacttcctggaggccaagggctacaaggaggtgaagaaggacctgatcatcaagctgcccaagtactccctgttcgagctggagaacggccggaagcggatgctggcctccgccggcgagctgcagaagggcaacgagctggccctgccctccaagtacgtgaacttcctgtacctggcctcccactacgagaagctgaagggctcccccgaggacaacgagcagaagcagctgttcgtggagcagcacaagcactacctggacgagatcatcgagcagatctccgagttctccaagcgggtgatcctggccgacgccaacctggacaaggtgctgtccgcctacaacaagcaccgggacaagcccatccgggagcaggccgagaacatcatccacctgttcaccctgaccaacctgggcgcccccgccgccttcaagtacttcgacaccaccatcgaccggaagcggtacacctccaccaaggaggtgctggacgccaccctgatccaccagtccatcaccggcctgtacgagacccggatcgacctgtcccagctgggcggcgactccggcggctcctccggcggctccaagcggaccgccgacggctccgagttcgagtcccccaagaagaagcggaaggtgtccggcggctcctccggcggctccatggactccaccaaggagaagtgcgactcctacaaggacgacctgctgctgcggatgggcctgaacgacaacaaggccggcatggagggcctggacaaggagaagatcaacaagatcatcatggaggccaccaagggctcccggttctacggcaacgagctgaagaaggagaagcaggtgaaccagcggatcgagaacatgatgcagcagaaggcccagatcacctcccagcagctgcggaaggcccagctgcaggtggaccggttcgccatggagctggagcagtcccggaacctgtccaacaccatcgtgcacatcgacatggacgccttctacgccgccgtggagatgcgggacaaccccgagctgaaggacaagcccatcgccgtgggctccatgtccatgctgtccacctccaactaccacgcccggcggttcggcgtgcgggccgccatgcccggcttcatcgccaagcggctgtgcccccagctgatcatcgtgccccccaacttcgacaagtaccgggccgtgtccaaggaggtgaaggagatcctggccgactacgaccccaacttcatggccatgtccctggacgaggcctacctgaacatcaccaagcacctggaggagcggcagaactggcccgaggacaagcggcggtacttcatcaagatgggctcctccgtggagaacgacaaccccggcaaggaggtgaacaagctgtccgagcacgagcggtccatctcccccctgctgttcgaggagtccccctccgacgtgcagccccccggcgaccccttccaggtgaacttcgaggagcagaacaacccccagatcctgcagaactccgtggtgttcggcacctccgcccaggaggtggtgaaggagatccggttccggatcgagcagaagaccaccctgaccgcctccgccggcatcgcccccaacaccatgctggccaaggtgtgctccgacaagaacaagcccaacggccagtaccagatcctgcccaaccggcaggccgtgatggacttcatcaaggacctgcccatccggaaggtgtccggcatcggcaaggtgaccgagaagatgctgaaggccctgggcatcatcacctgcaccgagctgtaccagcagcgggccctgctgtccctgctgttctccgagacctcctggcactacttcctgcacatctccctgggcctgggctccacccacctgacccgggaccgggtgcggaagtccatgtccgtggagcggaccttctccgagatcaacaaggccgaggagcagtactccctgtgccaggagctgtgctccgagctggcccaggacctgcagaaggagcggctgaagggccggaccgtgaccatcaagctgaagaacgtgaacttcgaggtgaagacccgggcctccaccgtgtcctccgtggtgtccaccgccgaggagatcttcgccatcgccaaggagctgctgaagaccgagatcgacgccgacttcccccaccccctgcggctgcggctgatgggcgtgcggatctcctccttccccaacgaggaggaccggaagcaccagcagtccggctccgagacccccggcacctccgagtccgccacccccgagtcccccaagaagaagcggaaggtgtagctagcaccagcctcaagaacacccgaatggagtctctaagctacataataccaacttacactttacaaaatgttgtcccccaaaatgtagccattcgtatctgctcctaataaaaagaaagtttcttcacattctctcgagaaaaaaaaaaaatggaaaaaaaaaaaacggaaaaaaaaaaaaggtaaaaaaaaaaaatataaaaaaaaaaaacataaaaaaaaaaaacgaaaaaaaaaaaacgtaaaaaaaaaaaactcaaaaaaaaaaaagataaaaaaaaaaaacctaaaaaaaaaaaatgtaaaaaaaaaaaagggaaaaaaaaaaaacgcaaaaaaaaaaaacacaaaaaaaaaaaatgcaaaaaaaaaaaatcgaaaaaaaaaaaatctaaaaaaaaaaaacgaaaaaaaaaaaacccaaaaaaaaaaaagacaaaaaaaaaaaatagaaaaaaaaaaagttaaaaaaaaaaaactgaaaaaaaaaaaatttaaaaaaaaaaaatctag

SEQ ID NO: 2663 - DNA, 6493 bp, synthetic construct
  misc_feature 1..6493: note = Synthetic
  source 1..6493: mol_type = other DNA
aggaagctcagaataaacgctcaactttggccggatctgccaccatgaagcggaccgccgacggctccgagttcgagtcccccaagaagaagcggaaggtggacaagaagtactccatcggcctggacatcggcaccaactccgtgggctgggccgtgatcaccgacgagtacaaggtgccctccaagaagttcaaggtgctgggcaacaccgaccggcactccatcaagaagaacctgatcggcgccctgctgttcgactccggcgagaccgccgaggccacccggctgaagcggaccgcccggcggcggtacacccggcggaagaaccggatctgctacctgcaggagatcttctccaacgagatggccaaggtggacgactccttcttccaccggctggaggagtccttcctggtggaggaggacaagaagcacgagcggcaccccatcttcggcaacatcgtggacgaggtggcctaccacgagaagtaccccaccatctaccacctgcggaagaagctggtggactccaccgacaaggccgacctgcggctgatctacctggccctggcccacatgatcaagttccggggccacttcctgatcgagggcgacctgaaccccgacaactccgacgtggacaagctgttcatccagctggtgcagacctacaaccagctgttcgaggagaaccccatcaacgcctccggcgtggacgccaaggccatcctgtccgcccggctgtccaagtcccggcggctggagaacctgatcgcccagctgcccggcgagaagaagaacggcctgttcggcaacctgatcgccctgtccctgggcctgacccccaacttcaagtccaacttcgacctggccgaggacgccaagctgcagctgtccaaggacacctacgacgacgacctggacaacctgctggcccagatcggcgaccagtacgccgacctgttcctggccgccaagaacctgtccgacgccatcctgctgtccgacatcctgcgggtgaacaccgagatcaccaaggcccccctgtccgcctccatgatcaagcggtacgacgagcaccaccaggacctgaccctgctgaaggccctggtgcggcagcagctgcccgagaagtacaaggagatcttcttcgaccagtccaagaacggctacgccggctacatcgacggcggcgcctcccaggaggagttctacaagttcatcaagcccatcctggagaagatggacggcaccgaggagctgctggtgaagctgaaccgggaggacctgctgcggaagcagcggaccttcgacaacggctccatcccccaccagatccacctgggcgagctgcacgccatcctgcggcggcaggaggacttctaccccttcctgaaggacaaccgggagaagatcgagaagatcctgaccttccggatcccctactacgtgggccccctggcccggggcaactcccggttcgcctggatgacccggaagtccgaggagaccatcaccccctggaacttcgaggaggtggtggacaagggcgcctccgcccagtccttcatcgagcggatgaccaacttcgacaagaacctgcccaacgagaaggtgctgcccaagcactccctgctgtacgagtacttcaccgtgtacaacgagctgaccaaggtgaagtacgtgaccgagggcatgcggaagcccgccttcctgtccggcgagcagaagaaggccatcgtggacctgctgttcaagaccaaccggaaggtgaccgtgaagcagctgaaggaggactacttcaagaagatcgagtgcttcgactccgtggagatctccggcgtggaggaccggttcaacgcctccctgggcacctaccacgacctgctgaagatcatcaaggacaaggacttcctggacaacgaggagaacgaggacatcctggaggacatcgtgctgaccctgaccctgttcgaggaccgggagatgatcgaggagcggctgaagacctacgcccacctgttcgacgacaaggtgatgaagcagctgaagcggcggcggtacaccggctggggccggctgtcccggaagctgatcaacggcatccgggacaagcagtccggcaagaccatcctggacttcctgaagtccgacggcttcgccaaccggaacttcatgcagctgatccacgacgactccctgaccttcaaggaggacatccagaaggcccaggtgtccggccagggcgactccctgcacgagcacatcgccaacctggccggctcccccgccatcaagaagggcatcctgcagaccgtgaaggtggtggacgagctggtgaaggtgatgggccggcacaagcccgagaacatcgtgatcgagatggcccgggagaaccagaccacccagaagggccagaagaactcccgggagcggatgaagcggatcgaggagggcatcaaggagctgggctcccagatcctgaaggagcaccccgtggagaacacccagctgcagaacgagaagctgtacctgtactacctgcagaacggccgggacatgtacgtggaccaggagctggacatcaaccggctgtccgactacgacgtggacgccatcgtgccccagtccttcctgaaggacgactccatcgacaacaaggtgctgacccggtccgacaagaaccggggcaagtccgacaacgtgccctccgaggaggtggtgaagaagatgaagaactactggcggcagctgctgaacgccaagctgatcacccagcggaagttcgacaacctgaccaaggccgagcggggcggcctgtccgagctggacaaggccggcttcatcaagcggcagctggtggagacccggcagatcaccaagcacgtggcccagatcctggactcccggatgaacaccaagtacgacgagaacgacaagctgatccgggaggtgaaggtgatcaccctgaagtccaagctggtgtccgacttccggaaggacttccagttctacaaggtgcgggagatcaacaactaccaccacgcccacgacgcctacctgaacgccgtggtgggcaccgccctgatcaagaagtaccccaagctggagtccgagttcgtgtacggcgactacaaggtgtacgacgtgcggaagatgatcgccaagtccgagcaggagatcggcaaggccaccgccaagtacttcttctactccaacatcatgaacttcttcaagaccgagatcaccctggccaacggcgagatccggaagcggcccctgatcgagaccaacggcgagaccggcgagatcgtgtgggacaagggccgggacttcgccaccgtgcggaaggtgctgtccatgccccaggtgaacatcgtgaagaagaccgaggtgcagaccggcggcttctccaaggagtccatcctgcccaagcggaactccgacaagctgatcgcccggaagaaggactgggaccccaagaagtacggcggcttcgactcccccaccgtggcctactccgtgctggtggtggccaaggtggagaagggcaagtccaagaagctgaagtccgtgaaggagctgctgggcatcaccatcatggagcggtcctccttcgagaagaaccccatcgacttcctggaggccaagggctacaaggaggtgaagaaggacctgatcatcaagctgcccaagtactccctgttcgagctggagaacggccggaagcggatgctggcctccgccggcgagctgcagaagggcaacgagctggccctgccctccaagtacgtgaacttcctgtacctggcctcccactacgagaagctgaagggctcccccgaggacaacgagcagaagcagctgttcgtggagcagcacaagcactacctggacgagatcatcgagcagatctccgagttctccaagcgggtgatcctggccgacgccaacctggacaaggtgctgtccgcctacaacaagcaccgggacaagcccatccgggagcaggccgagaacatcatccacctgttcaccctgaccaacctgggcgcccccgccgccttcaagtacttcgacaccaccatcgaccggaagcggtacacctccaccaaggaggtgctggacgccaccctgatccaccagtccatcaccggcctgtacgagacccggatcgacctgtcccagctgggcggcgacggcgcccccgagtccgccaccgagtccggcggcacctccaccgagtccgagggctccgccggcacctccaccgagtccgagggctccgccggctccgccggctccacctccggctcctcctcctccatggactccaccaaggagaagtgcgactcctacaaggacgacctgctgctgcggatgggcctgaacgacaacaaggccggcatggagggcctggacaaggagaagatcaacaagatcatcatggaggccaccaagggctcccggttctacggcaacgagctgaagaaggagaagcaggtgaaccagcggatcgagaacatgatgcagcagaaggcccagatcacctcccagcagctgcggaaggcccagctgcaggtggaccggttcgccatggagctggagcagtcccggaacctgtccaacaccatcgtgcacatcgacatggacgccttctacgccgccgtggagatgcgggacaaccccgagctgaaggacaagcccatcgccgtgggctccatgtccatgctgtccacctccaactaccacgcccggcggttcggcgtgcgggccgccatgcccggcttcatcgccaagcggctgtgcccccagctgatcatcgtgccccccaacttcgacaagtaccgggccgtgtccaaggaggtgaaggagatcctggccgactacgaccccaacttcatggccatgtccctggacgaggcctacctgaacatcaccaagcacctggaggagcggcagaactggcccgaggacaagcggcggtacttcatcaagatgggctcctccgtggagaacgacaaccccggcaaggaggtgaacaagctgtccgagcacgagcggtccatctcccccctgctgttcgaggagtccccctccgacgtgcagccccccggcgaccccttccaggtgaacttcgaggagcagaacaacccccagatcctgcagaactccgtggtgttcggcacctccgcccaggaggtggtgaaggagatccggttccggatcgagcagaagaccaccctgaccgcctccgccggcatcgcccccaacaccatgctggccaaggtgtgctccgacaagaacaagcccaacggccagtaccagatcctgcccaaccggcaggccgtgatggacttcatcaaggacctgcccatccggaaggtgtccggcatcggcaaggtgaccgagaagatgctgaaggccctgggcatcatcacctgcaccgagctgtaccagcagcgggccctgctgtccctgctgttctccgagacctcctggcactacttcctgcacatctccctgggcctgggctccacccacctgacccgggaccgggtgcggaagtccatgtccgtggagcggaccttctccgagatcaacaaggccgaggagcagtactccctgtgccaggagctgtgctccgagctggcccaggacctgcagaaggagcggctgaagggccggaccgtgaccatcaagctgaagaacgtgaacttcgaggtgaagacccgggcctccaccgtgtcctccgtggtgtccaccgccgaggagatcttcgccatcgccaaggagctgctgaagaccgagatcgacgccgacttcccccaccccctgcggctgcggctgatgggcgtgcggatctcctccttccccaacgaggaggaccggaagcaccagcagtccggctccgagacccccggcacctccgagtccgccacccccgagtcccccaagaagaagcggaaggtgtagctagcaccagcctcaagaacacccgaatggagtctctaagctacataataccaacttacactttacaaaatgttgtcccccaaaatgtagccattcgtatctgctcctaataaaaagaaagtttcttcacattctctcgagaaaaaaaaaaaatggaaaaaaaaaaaacggaaaaaaaaaaaaggtaaaaaaaaaaaatataaaaaaaaaaaacataaaaaaaaaaaacgaaaaaaaaaaaacgtaaaaaaaaaaaactcaaaaaaaaaaaagataaaaaaaaaaaacctaaaaaaaaaaaatgtaaaaaaaaaaaagggaaaaaaaaaaaacgcaaaaaaaaaaaacacaaaaaaaaaaaatgcaaaaaaaaaaaatcgaaaaaaaaaaaatctaaaaaaaaaaaacgaaaaaaaaaaaacccaaaaaaaaaaaagacaaaaaaaaaaaatagaaaaaaaaaaagttaaaaaaaaaaaactgaaaaaaaaaaaatttaaaaaaaaaaaatctag

SEQ ID NO: 2664 - DNA, 6487 bp, synthetic construct
  misc_feature 1..6487: note = Synthetic
  source 1..6487: mol_type = other DNA
aggaagctcagaataaacgctcaactttggccggatctgccaccatgaagcggaccgccgacggctccgagttcgagtcccccaagaagaagcggaaggtggacaagaagtactccatcggcctggacatcggcaccaactccgtgggctgggccgtgatcaccgacgagtacaaggtgccctccaagaagttcaaggtgctgggcaacaccgaccggcactccatcaagaagaacctgatcggcgccctgctgttcgactccggcgagaccgccgaggccacccggctgaagcggaccgcccggcggcggtacacccggcggaagaaccggatctgctacctgcaggagatcttctccaacgagatggccaaggtggacgactccttcttccaccggctggaggagtccttcctggtggaggaggacaagaagcacgagcggcaccccatcttcggcaacatcgtggacgaggtggcctaccacgagaagtaccccaccatctaccacctgcggaagaagctggtggactccaccgacaaggccgacctgcggctgatctacctggccctggcccacatgatcaagttccggggccacttcctgatcgagggcgacctgaaccccgacaactccgacgtggacaagctgttcatccagctggtgcagacctacaaccagctgttcgaggagaaccccatcaacgcctccggcgtggacgccaaggccatcctgtccgcccggctgtccaagtcccggcggctggagaacctgatcgcccagctgcccggcgagaagaagaacggcctgttcggcaacctgatcgccctgtccctgggcctgacccccaacttcaagtccaacttcgacctggccgaggacgccaagctgcagctgtccaaggacacctacgacgacgacctggacaacctgctggcccagatcggcgaccagtacgccgacctgttcctggccgccaagaacctgtccgacgccatcctgctgtccgacatcctgcgggtgaacaccgagatcaccaaggcccccctgtccgcctccatgatcaagcggtacgacgagcaccaccaggacctgaccctgctgaaggccctggtgcggcagcagctgcccgagaagtacaaggagatcttcttcgaccagtccaagaacggctacgccggctacatcgacggcggcgcctcccaggaggagttctacaagttcatcaagcccatcctggagaagatggacggcaccgaggagctgctggtgaagctgaaccgggaggacctgctgcggaagcagcggaccttcgacaacggctccatcccccaccagatccacctgggcgagctgcacgccatcctgcggcggcaggaggacttctaccccttcctgaaggacaaccgggagaagatcgagaagatcctgaccttccggatcccctactacgtgggccccctggcccggggcaactcccggttcgcctggatgacccggaagtccgaggagaccatcaccccctggaacttcgaggaggtggtggacaagggcgcctccgcccagtccttcatcgagcggatgaccaacttcgacaagaacctgcccaacgagaaggtgctgcccaagcactccctgctgtacgagtacttcaccgtgtacaacgagctgaccaaggtgaagtacgtgaccgagggcatgcggaagcccgccttcctgtccggcgagcagaagaaggccatcgtggacctgctgttcaagaccaaccggaaggtgaccgtgaagcagctgaaggaggactacttcaagaagatcgagtgcttcgactccgtggagatctccggcgtggaggaccggttcaacgcctccctgggcacctaccacgacctgctgaagatcatcaaggacaaggacttcctggacaacgaggagaacgaggacatcctggaggacatcgtgctgaccctgaccctgttcgaggaccgggagatgatcgaggagcggctgaagacctacgcccacctgttcgacgacaaggtgatgaagcagctgaagcggcggcggtacaccggctggggccggctgtcccggaagctgatcaacggcatccgggacaagcagtccggcaagaccatcctggacttcctgaagtccgacggcttcgccaaccggaacttcatgcagctgatccacgacgactccctgaccttcaaggaggacatccagaaggcccaggtgtccggccagggcgactccctgcacgagcacatcgccaacctggccggctcccccgccatcaagaagggcatcctgcagaccgtgaaggtggtggacgagctggtgaaggtgatgggccggcacaagcccgagaacatcgtgatcgagatggcccgggagaaccagaccacccagaagggccagaagaactcccgggagcggatgaagcggatcgaggagggcatcaaggagctgggctcccagatcctgaaggagcaccccgtggagaacacccagctgcagaacgagaagctgtacctgtactacctgcagaacggccgggacatgtacgtggaccaggagctggacatcaaccggctgtccgactacgacgtggacgccatcgtgccccagtccttcctgaaggacgactccatcgacaacaaggtgctgacccggtccgacaagaaccggggcaagtccgacaacgtgccctccgaggaggtggtgaagaagatgaagaactactggcggcagctgctgaacgccaagctgatcacccagcggaagttcgacaacctgaccaaggccgagcggggcggcctgtccgagctggacaaggccggcttcatcaagcggcagctggtggagacccggcagatcaccaagcacgtggcccagatcctggactcccggatgaacaccaagtacgacgagaacgacaagctgatccgggaggtgaaggtgatcaccctgaagtccaagctggtgtccgacttccggaaggacttccagttctacaaggtgcgggagatcaacaactaccaccacgcccacgacgcctacctgaacgccgtggtgggcaccgccctgatcaagaagtaccccaagctggagtccgagttcgtgtacggcgactacaaggtgtacgacgtgcggaagatgatcgccaagtccgagcaggagatcggcaaggccaccgccaagtacttcttctactccaacatcatgaacttcttcaagaccgagatcaccctggccaacggcgagatccggaagcggcccctgatcgagaccaacggcgagaccggcgagatcgtgtgggacaagggccgggacttcgccaccgtgcggaaggtgctgtccatgccccaggtgaacatcgtgaagaagaccgaggtgcagaccggcggcttctccaaggagtccatcctgcccaagcggaactccgacaagctgatcgcccggaagaaggactgggaccccaagaagtacggcggcttcgactcccccaccgtggcctactccgtgctggtggtggccaaggtggagaagggcaagtccaagaagctgaagtccgtgaaggagctgctgggcatcaccatcatggagcggtcctccttcgagaagaaccccatcgacttcctggaggccaagggctacaaggaggtgaagaaggacctgatcatcaagctgcccaagtactccctgttcgagctggagaacggccggaagcggatgctggcctccgccggcgagctgcagaagggcaacgagctggccctgccctccaagtacgtgaacttcctgtacctggcctcccactacgagaagctgaagggctcccccgaggacaacgagcagaagcagctgttcgtggagcagcacaagcactacctggacgagatcatcgagcagatctccgagttctccaagcgggtgatcctggccgacgccaacctggacaaggtgctgtccgcctacaacaagcaccgggacaagcccatccgggagcaggccgagaacatcatccacctgttcaccctgaccaacctgggcgcccccgccgccttcaagtacttcgacaccaccatcgaccggaagcggtacacctccaccaaggaggtgctggacgccaccctgatccaccagtccatcaccggcctgtacgagacccggatcgacctgtcccagctgggcggcgacggtaccaaggacagcaccaaagatatcccggaaaccccgagcaaggaccccaagaagaagcggaaggtgggtaccaaggacagcaccaaagatatcccggaaaccccgagcaaggactccatggactccaccaaggagaagtgcgactcctacaaggacgacctgctgctgcggatgggcctgaacgacaacaaggccggcatggagggcctggacaaggagaagatcaacaagatcatcatggaggccaccaagggctcccggttctacggcaacgagctgaagaaggagaagcaggtgaaccagcggatcgagaacatgatgcagcagaaggcccagatcacctcccagcagctgcggaaggcccagctgcaggtggaccggttcgccatggagctggagcagtcccggaacctgtccaacaccatcgtgcacatcgacatggacgccttctacgccgccgtggagatgcgggacaaccccgagctgaaggacaagcccatcgccgtgggctccatgtccatgctgtccacctccaactaccacgcccggcggttcggcgtgcgggccgccatgcccggcttcatcgccaagcggctgtgcccccagctgatcatcgtgccccccaacttcgacaagtaccgggccgtgtccaaggaggtgaaggagatcctggccgactacgaccccaacttcatggccatgtccctggacgaggcctacctgaacatcaccaagcacctggaggagcggcagaactggcccgaggacaagcggcggtacttcatcaagatgggctcctccgtggagaacgacaaccccggcaaggaggtgaacaagctgtccgagcacgagcggtccatctcccccctgctgttcgaggagtccccctccgacgtgcagccccccggcgaccccttccaggtgaacttcgaggagcagaacaacccccagatcctgcagaactccgtggtgttcggcacctccgcccaggaggtggtgaaggagatccggttccggatcgagcagaagaccaccctgaccgcctccgccggcatcgcccccaacaccatgctggccaaggtgtgctccgacaagaacaagcccaacggccagtaccagatcctgcccaaccggcaggccgtgatggacttcatcaaggacctgcccatccggaaggtgtccggcatcggcaaggtgaccgagaagatgctgaaggccctgggcatcatcacctgcaccgagctgtaccagcagcgggccctgctgtccctgctgttctccgagacctcctggcactacttcctgcacatctccctgggcctgggctccacccacctgacccgggaccgggtgcggaagtccatgtccgtggagcggaccttctccgagatcaacaaggccgaggagcagtactccctgtgccaggagctgtgctccgagctggcccaggacctgcagaaggagcggctgaagggccggaccgtgaccatcaagctgaagaacgtgaacttcgaggtgaagacccgggcctccaccgtgtcctccgtggtgtccaccgccgaggagatcttcgccatcgccaaggagctgctgaagaccgagatcgacgccgacttcccccaccccctgcggctgcggctgatgggcgtgcggatctcctccttccccaacgaggaggaccggaagcaccagcagtccggctccgagacccccggcacctccgagtccgccacccccgagtcccccaagaagaagcggaaggtgtagctagcaccagcctcaagaacacccgaatggagtctctaagctacataataccaacttacactttacaaaatgttgtcccccaaaatgtagccattcgtatctgctcctaataaaaagaaagtttcttcacattctctcgagaaaaaaaaaaaatggaaaaaaaaaaaacggaaaaaaaaaaaaggtaaaaaaaaaaaatataaaaaaaaaaaacataaaaaaaaaaaacgaaaaaaaaaaaacgtaaaaaaaaaaaactcaaaaaaaaaaaagataaaaaaaaaaaacctaaaaaaaaaaaatgtaaaaaaaaaaaagggaaaaaaaaaaaacgcaaaaaaaaaaaacacaaaaaaaaaaaatgcaaaaaaaaaaaatcgaaaaaaaaaaaatctaaaaaaaaaaaacgaaaaaaaaaaaacccaaaaaaaaaaaagacaaaaaaaaaaaatagaaaaaaaaaaagttaaaaaaaaaaaactgaaaaaaaaaaaatttaaaaaaaaaaaatctag

SEQ ID NO: 2665 - DNA, 6641 bp, synthetic construct; identical to SEQ ID NO: 2580
  misc_feature 1..6641: note = Synthetic
  source 1..6641: mol_type = other DNA

SEQ ID NO: 2666 - DNA, 6641 bp, synthetic construct; identical to SEQ ID NO: 2581
  misc_feature 1..6641: note = Synthetic
  source 1..6641: mol_type = other DNA

SEQ ID NO: 2667 - DNA, 6641 bp, synthetic construct; identical to SEQ ID NO: 2582
  misc_feature 1..6641: note = Synthetic
  source 1..6641: mol_type = other DNA

SEQ ID NO: 2668 - DNA, 6683 bp, synthetic construct; identical to SEQ ID NO: 2583
  misc_feature 1..6683: note = Synthetic
  source 1..6683: mol_type = other DNA

SEQ ID NO: 2669 - DNA, 6683 bp, synthetic construct; identical to SEQ ID NO: 2584
  misc_feature 1..6683: note = Synthetic
  source 1..6683: mol_type = other DNA

SEQ ID NO: 2670 - DNA, 6554 bp, synthetic construct; identical to SEQ ID NO: 2585
  misc_feature 1..6554: note = Synthetic
  source 1..6554: mol_type = other DNA

SEQ ID NO: 2671-3000 - skipped (330 entries)

SEQ ID NO: 3001 - DNA, 3473 bp, synthetic construct; identical to SEQ ID NO: 1957
  misc_feature 1..3473: note = Synthetic
  source 1..3473: mol_type = other DNA

SEQ ID NO: 3002 - DNA, 3602 bp, synthetic construct
  misc_feature 1..3602: note = Synthetic
  source 1..3602: mol_type = other DNA
aggactcactatttgttttcgcgcccagttgcaaaaagtgtcgaagctcagaataaacgctcaactttggccggatctgccaccatgggcgtgaagatcatctcccgcaagtccctgggcacccagaacgtgtacgacatcggcgtggagaaggaccacaacttcctgctgaagaacggcctggtggcctccaactgcttcaactccggcggctccaagcggaccgccgacggctccgagttcgagtcccccaagaagaagcggaaggtgtccggcggctcctccggcggctccatgaagatcgccgtggtggacaaggccctgaacaacacccggtacgacaagcacttccagctgtacggcgaggaggtggacgtgttccacatgtgcaacgagaagctgtccggccggctgctgaagaagcacatcaccatcggcacccccgagaaccccttcgaccccaacgactacgacttcgtgatcctggtgggcgccgagcccttcctgtacttcgccggcaagaagggcatcggcgactacaccggcaagcgggtggagtacaacggctacgccaactggatcgcctccatctcccccgcccagctgcacttcaagcccgagatgaagcccgtgttcgacgccaccgtggagaacatccacgacatcatcaacggccgggagaagatcgccaaggccggcgactaccggcccatcaccgaccccgacgaggccgaggagtacatcaagatggtgtacaacatggtgatcggccccgtggccttcgcctccgccacctccgccctgtactgccgggacggctacctgctgggcgtgtccatctcccaccaggagtaccagggcgtgtacatcgactccgactgcctgaccgaggtggccgtgtactacctgcagaagatcctggactccgagaaccacaccatcgtgttccacaacctgaagttcgacatgcacttctacaagtaccacctgggcctgaccttcgacaaggcccacaaggagcggcggctgcacgacaccatgctgcagcactacgtgctggacgagcggcggggcacccacggcctgaagtccctggccatgaagtacaccgacatgggcgactacgacttcgagctggacaagttcaaggacgactactgcaaggcccacaagatcaagaaggaggacttcacctacgacctgatccccttcgacatcatgtggccctacgccgccaaggacaccgacgccaccatccggctgcacaacttcttcctgcccaagatcgagaagaacgagaagctgtgctccctgtactacgacgtgctgatgcccggctgcgtgttcctgcagcgggtggaggaccggggcgtgcccatctccatcgaccggctgaaggaggcccagtaccagctgacccacaacctgaacaaggcccgggagaagctgtacacctaccccgaggtgaagcagctggagcaggaccagaacgaggccttcaaccccaactccgtgaagcagctgcgggtgctgctgttcgactacgtgggcctgacccccaccggcaagctgaccgacaccggcgccgactccaccgacgccgaggccctgaacgagctggccacccagcaccccatcgccaagaccctgctggagatccggaagctgaccaagctgatctccacctacgtggagaagatcctgctgtccatcgacgccgacggctgcatccggaccggcttccacgagcacatgaccacctccggccggctgtcctcctccggcaagctgaacctgcagcagctgccccgggacgagtccatcatcaagggctgcgtggtggccccccccggctaccgggtgatcgcctgggacctgaccaccgccgaggtgtactacgccgccgtgctgtccggcgaccggaacatgcagcaggtgttcatcaacatgcggaacgagcccgacaagtaccccgacttccactccaacatcgcccacatggtgttcaagctgcagtgcgagccccgggacgtgaagaagctgttccccgccctgcggcaggccgccaaggccatcaccttcggcatcctgtacggctccggccccgccaaggtggcccactccgtgaacgaggccctgctggagcaggccgccaagaccggcgagcccttcgtggagtgcaccgtggccgacgccaaggagtacatcgagacctacttcggccagttcccccagctgaagcggtggatcgacaagtgccacgaccagatcaagaaccacggcttcatctactcccacttcggccggaagcggcggctgcacaacatccactccgaggaccggggcgtgcagggcgaggagatccggtccggcttcaacgccatcatccagtccgcctcctccgactccctgctgctgggcgccgtggacgccgacaacgagatcatctccctgggcctggagcaggagatgaagatcgtgatgctggtgcacgactccgtggtggccatcgtgcgggaggacctgatcgaccagtacaacgagatcctgatccggaacatccagaaggaccggggcatctccatccccggctgccccatcggcatcgactccgactccgaggccggcggctcccgggactactcctgcggcaagatgaagaagcagcacccctccatcgcctgcatcgacgacgacgagtacacccggtacgtgaagggcgtgctgctggacgccgagttcgagtacaagaagctggccgccatggacaaggagcaccccgaccactccaagtacaaggacgacaagttcatcgccgtgtgcaaggacctggacaacgtgaagcggatcctgggcgccggcggcggctccggcaagcggaccgccgacggctccggcggcggctcccccaagaagaagcggaaggtgcccgccgccaagcgcgtgaagctggacggcggcggctccggcaagcggaccgccgacggctccggcggcggctccatcgccgccctggagaaggagatcgccgccctggagaaggagaacgccgccctggagtgggagatcgccgccctggagaagtagctagcaccagcctcaagaacacccgaatggagtctctaagctacataataccaacttacactttacaaaatgttgtcccccaaaatgtagccattcgtatctgctcctaataaaaagaaagtttcttcacattctctcgagaaaaaaaaaaaatggaaaaaaaaaaaacggaaaaaaaaaaaaggtaaaaaaaaaaaatataaaaaaaaaaaacataaaaaaaaaaaacgaaaaaaaaaaaacgtaaaaaaaaaaaactcaaaaaaaaaaaagataaaaaaaaaaaacctaaaaaaaaaaaatgtaaaaaaaaaaaagggaaaaaaaaaaaacgcaaaaaaaaaaaacacaaaaaaaaaaaatgcaaaaaaaaaaaatcgaaaaaaaaaaaatctaaaaaaaaaaaacgaaaaaaaaaaaacccaaaaaaaaaaaagacaaaaaaaaaaaatagaaaaaaaaaaagttaaaaaaaaaaaactgaaaaaaaaaaaatttaaaaaaaaaaaatctag

SEQ ID NO: 3003 - DNA, 3602 bp, synthetic construct
  misc_feature 1..3602: note = Synthetic
  source 1..3602: mol_type = other DNA
aggactcactatttgttttcgcgcccagttgcaaaaagtgtcgaagctcagaataaacgctcaactttggccggatctgccaccatgggcgtgaagatcatctcccgcaagtccctgggcacccagaacgtgtacgacatcggcgtggagaaggaccacaacttcctgctgaagaacggcctggtggcctccaactgcttcaactccggcggctccaagcggaccgccgacggctccgagttcgagtcccccaagaagaagcggaaggtgtccggcggctcctccggcggctccatgaagatcgccgtggtggacaaggccctgaacaacacccggtacgacaagcacttccagctgtacggcgaggaggtggacgtgttccacatgtgcaacgagaagctgtccggccggctgctgaagaagcacatcaccatcggcacccccgagaaccccttcgaccccaacgactacgacttcgtgatcctggtgggcgccgagcccttcctgtacttcgccggcaagaagggcatcggcgactacaccggcaagcgggtggagtacaacggctacgccaactggatcgcctccatctcccccgcccagctgcacttcaagcccgagatgaagcccgtgttcgacgccaccgtggagaacatccacgacatcatcaacggccgggagaagatcgccaaggccggcgactaccggcccatcaccgaccccgacgaggccgaggagtacatcaagatggtgtacaacatggtgatcggccccgtggccttcgcctccgccacctccgccctgtactgccgggacggctacctgctgggcgtgtccatctcccaccaggagtaccagggcgtgtacatcgactccgactgcctgaccgaggtggccgtgtactacctgcagaagatcctggactccgagaaccacaccatcgtgttccacaacctgaagttcgacatgcacttctacaagtaccacctgggcctgaccttcgacaaggcccacaaggagcggcggctgcacgacaccatgctgcagcactacgtgctggacgagcggcggggcacccacggcctgaagtccctggccatgaagtacaccgacatgggcgactacgacttcgagctggacaagttcaaggacgactactgcaaggcccacaagatcaagaaggaggacttcacctacgacctgatccccttcgacatcatgtggccctacgccgccaaggacaccgacgccaccatccggctgcacaacttcttcctgcccaagatcgagaagaacgagaagctgtgctccctgtactacgacgtgctgatgcccggctgcgtgttcctgcagcgggtggaggaccggggcgtgcccatctccatcgaccggctgaaggaggcccagtaccagctgacccacaacctgaacaaggcccgggagaagctgtacacctaccccgaggtgaagcagctggagcaggaccagaacgaggccttcaaccccaactccgtgaagcagctgcgggtgctgctgttcgactacgtgggcctgacccccaccggcaagctgaccgacaccggcgccgactccaccgacgccgaggccctgaacgagctggccacccagcaccccatcgccaagaccctgctggagatccggaagctgaccaagctgatctccacctacgtggagaagatcctgctgtccatcgacgccgacggctgcatccggaccggcttccacgagcacatgaccacctccggccggctgtcctcctccggcaagctgaacctgcagcagctgccccgggacgagtccatcatcaagggctgcgtggtggccccccccggctaccgggtgatcgcctgggacctgaccaccgccgaggtgtactacgccgccgtgctgtccggcgaccggaacatgcagcaggtgttcatcaacatgcggaacgagcccgacaagtaccccgacttccactccaacatcgcccacatggtgttcaagctgcagtgcgagccccgggacgtgaagaagctgttccccgccctgcggcaggccgccaaggccatcaccttcggcatcctgtacggctccggccccgccaaggtggcccactccgtgaacgaggccctgctggagcaggccgccaagaccggcgagcccttcgtggagtgcaccgtggccgacgccaaggagtacatcgagacctacttcggccagttcccccagctgaagcggtggatcgacaagtgccacgaccagatcaagaaccacggcttcatctactcccacttcggccggaagcggcggctgcacaacatccactccgaggaccggggcgtgcagggcgaggagatccggtccggcttcaacgccatcatccagtccgcctcctccgactccctgctgctgggcgccgtggacgccgacaacgagatcatctccctgggcctggagcaggagatgaagatcgtgatgctggtgcacgactccgtggtggccatcgtgcgggaggacctgatcgaccagtacaacgagatcctgatccggaacatccagaaggaccggggcatctccatccccggctgccccatcggcatcgactccgactccgaggccggcggctcccgggactactcctgcggcaagatgaagaagcagcacccctccatcgcctgcatcgacgacgacgagtacacccggtacgtgaagggcgtgctgctggacgccgagttcgagtacaagaagctggccgccatggacaaggagcaccccgaccactccaagtacaaggacgacaagttcatcgccgtgtgcaaggacctggacaacgtgaagcggatcctgggcgccggcggcggctccggcaagcggaccgccgacggctccggcggcggctcccccaagaagaagcggaaggtgcccgccgccaagcgcgtgaagctggactccggctccgagacccccggcacctccgagtccgccacccccgagtccatcgccgccctggagaaggagatcgccgccctggagaaggagaacgccgccctggagtgggagatcgccgccctggagaagtagctagcaccagcctcaagaacacccgaatggagtctctaagctacataataccaacttacactttacaaaatgttgtcccccaaaatgtagccattcgtatctgctcctaataaaaagaaagtttcttcacattctctcgagaaaaaaaaaaaatggaaaaaaaaaaaacggaaaaaaaaaaaaggtaaaaaaaaaaaatataaaaaaaaaaaacataaaaaaaaaaaacgaaaaaaaaaaaacgtaaaaaaaaaaaactcaaaaaaaaaaaagataaaaaaaaaaaacctaaaaaaaaaaaatgtaaaaaaaaaaaagggaaaaaaaaaaaacgcaaaaaaaaaaaacacaaaaaaaaaaaatgcaaaaaaaaaaaatcgaaaaaaaaaaaatctaaaaaaaaaaaacgaaaaaaaaaaaacccaaaaaaaaaaaagacaaaaaaaaaaaatagaaaaaaaaaaagttaaaaaaaaaaaactgaaaaaaaaaaaatttaaaaaaaaaaaatctag

SEQ ID NO: 3004 - DNA, 2615 bp, synthetic construct
  misc_feature 1..2615: note = Synthetic
  source 1..2615: mol_type = other DNA
aggactcactatttgttttcgcgcccagttgcaaaaagtgtcgaagctcagaataaacgctcaactttggccggatctgccaccatgggcgtgaagatcatctcccgcaagtccctgggcacccagaacgtgtacgacatcggcgtggagaaggaccacaacttcctgctgaagaacggcctggtggcctccaactgcttcaactccggcggctccaagcggaccgccgacggctccgagttcgagtcccccaagaagaagcggaaggtgtccggcggctcctccggcggctccatggactccaccaaggagaagtgcgactcctacaaggacgacctgctgctgcggatgggcctgaacgacaacaaggccggcatggagggcctggacaaggagaagatcaacaagatcatcatggaggccaccaagggctcccggttctacggcaacgagctgaagaaggagaagcaggtgaaccagcggatcgagaacatgatgcagcagaaggcccagatcacctcccagcagctgcggaaggcccagctgcaggtggaccggttcgccatggagctggagcagtcccggaacctgtccaacaccatcgtgcacatcgacatggacgccttctacgccgccgtggagatgcgggacaaccccgagctgaaggacaagcccatcgccgtgggctccatgtccatgctgtccacctccaactaccacgcccggcggttcggcgtgcgggccgccatgcccggcttcatcgccaagcggctgtgcccccagctgatcatcgtgccccccaacttcgacaagtaccgggccgtgtccaaggaggtgaaggagatcctggccgactacgaccccaacttcatggccatgtccctggacgaggcctacctgaacatcaccaagcacctggaggagcggcagaactggcccgaggacaagcggcggtacttcatcaagatgggctcctccgtggagaacgacaaccccggcaaggaggtgaacaagctgtccgagcacgagcggtccatctcccccctgctgttcgaggagtccccctccgacgtgcagccccccggcgaccccttccaggtgaacttcgaggagcagaacaacccccagatcctgcagaactccgtggtgttcggcacctccgcccaggaggtggtgaaggagatccggttccggatcgagcagaagaccaccctgaccgcctccgccggcatcgcccccaacaccatgctggccaaggtgtgctccgacaagaacaagcccaacggccagtaccagatcctgcccaaccggcaggccgtgatggacttcatcaaggacctgcccatccggaaggtgtccggcatcggcaaggtgaccgagaagatgctgaaggccctgggcatcatcacctgcaccgagctgtaccagcagcgggccctgctgtccctgctgttctccgagacctcctggcactacttcctgcacatctccctgggcctgggctccacccacctgacccgggaccgggtgcggaagtccatgtccgtggagcggaccttctccgagatcaacaaggccgaggagcagtactccctgtgccaggagctgtgctccgagctggcccaggacctgcagaaggagcggctgaagggccggaccgtgaccatcaagctgaagaacgtgaacttcgaggtgaagacccgggcctccaccgtgtcctccgtggtgtccaccgccgaggagatcttcgccatcgccaaggagctgctgaagaccgagatcgacgccgacttcccccaccccctgcggctgcggctgatgggcgtgcggatctcctccttccccaacgaggaggaccggaagcaccagcagggcggcggctccggcaagcggaccgccgacggctccggcggcggctcccccaagaagaagcggaaggtgcccgccgccaagcgcgtgaagctggacggcggcggctccggcaagcggaccgccgacggctccggcggcggctccatcgccgccctggagaaggagatcgccgccctggagaaggagaacgccgccctggagtgggagatcgccgccctggagaagtagctagcaccagcctcaagaacacccgaatggagtctctaagctacataataccaacttacactttacaaaatgttgtcccccaaaatgtagccattcgtatctgctcctaataaaaagaaagtttcttcacattctctcgagaaaaaaaaaaaatggaaaaaaaaaaaacggaaaaaaaaaaaaggtaaaaaaaaaaaatataaaaaaaaaaaacataaaaaaaaaaaacgaaaaaaaaaaaacgtaaaaaaaaaaaactcaaaaaaaaaaaagataaaaaaaaaaaacctaaaaaaaaaaaatgtaaaaaaaaaaaagggaaaaaaaaaaaacgcaaaaaaaaaaaacacaaaaaaaaaaaatgcaaaaaaaaaaaatcgaaaaaaaaaaaatctaaaaaaaaaaaacgaaaaaaaaaaaacccaaaaaaaaaaaagacaaaaaaaaaaaatagaaaaaaaaaaagttaaaaaaaaaaaactgaaaaaaaaaaaatttaaaaaaaaaaaatctag

SEQ ID NO: 3005 - DNA, 2615 bp, synthetic construct
  misc_feature 1..2615: note = Synthetic
  source 1..2615: mol_type = other DNA
aggactcactatttgttttcgcgcccagttgcaaaaagtgtcgaagctcagaataaacgctcaactttggccggatctgccaccatgggcgtgaagatcatctcccgcaagtccctgggcacccagaacgtgtacgacatcggcgtggagaaggaccacaacttcctgctgaagaacggcctggtggcctccaactgcttcaactccggcggctccaagcggaccgccgacggctccgagttcgagtcccccaagaagaagcggaaggtgtccggcggctcctccggcggctccatggactccaccaaggagaagtgcgactcctacaaggacgacctgctgctgcggatgggcctgaacgacaacaaggccggcatggagggcctggacaaggagaagatcaacaagatcatcatggaggccaccaagggctcccggttctacggcaacgagctgaagaaggagaagcaggtgaaccagcggatcgagaacatgatgcagcagaaggcccagatcacctcccagcagctgcggaaggcccagctgcaggtggaccggttcgccatggagctggagcagtcccggaacctgtccaacaccatcgtgcacatcgacatggacgccttctacgccgccgtggagatgcgggacaaccccgagctgaaggacaagcccatcgccgtgggctccatgtccatgctgtccacctccaactaccacgcccggcggttcggcgtgcgggccgccatgcccggcttcatcgccaagcggctgtgcccccagctgatcatcgtgccccccaacttcgacaagtaccgggccgtgtccaaggaggtgaaggagatcctggccgactacgaccccaacttcatggccatgtccctggacgaggcctacctgaacatcaccaagcacctggaggagcggcagaactggcccgaggacaagcggcggtacttcatcaagatgggctcctccgtggagaacgacaaccccggcaaggaggtgaacaagctgtccgagcacgagcggtccatctcccccctgctgttcgaggagtccccctccgacgtgcagccccccggcgaccccttccaggtgaacttcgaggagcagaacaacccccagatcctgcagaactccgtggtgttcggcacctccgcccaggaggtggtgaaggagatccggttccggatcgagcagaagaccaccctgaccgcctccgccggcatcgcccccaacaccatgctggccaaggtgtgctccgacaagaacaagcccaacggccagtaccagatcctgcccaaccggcaggccgtgatggacttcatcaaggacctgcccatccggaaggtgtccggcatcggcaaggtgaccgagaagatgctgaaggccctgggcatcatcacctgcaccgagctgtaccagcagcgggccctgctgtccctgctgttctccgagacctcctggcactacttcctgcacatctccctgggcctgggctccacccacctgacccgggaccgggtgcggaagtccatgtccgtggagcggaccttctccgagatcaacaaggccgaggagcagtactccctgtgccaggagctgtgctccgagctggcccaggacctgcagaaggagcggctgaagggccggaccgtgaccatcaagctgaagaacgtgaacttcgaggtgaagacccgggcctccaccgtgtcctccgtggtgtccaccgccgaggagatcttcgccatcgccaaggagctgctgaagaccgagatcgacgccgacttcccccaccccctgcggctgcggctgatgggcgtgcggatctcctccttccccaacgaggaggaccggaagcaccagcagggcggcggctccggcaagcggaccgccgacggctccggcggcggctcccccaagaagaagcggaaggtgcccgccgccaagcgcgtgaagctggactccggctccgagacccccggcacctccgagtccgccacccccgagtccatcgccgccctggagaaggagatcgccgccctggagaaggagaacgccgccctggagtgggagatcgccgccctggagaagtagctagcaccagcctcaagaacacccgaatggagtctctaagctacataataccaacttacactttacaaaatgttgtcccccaaaatgtagccattcgtatctgctcctaataaaaagaaagtttcttcacattctctcgagaaaaaaaaaaaatggaaaaaaaaaaaacggaaaaaaaaaaaaggtaaaaaaaaaaaatataaaaaaaaaaaacataaaaaaaaaaaacgaaaaaaaaaaaacgtaaaaaaaaaaaactcaaaaaaaaaaaagataaaaaaaaaaaacctaaaaaaaaaaaatgtaaaaaaaaaaaagggaaaaaaaaaaaacgcaaaaaaaaaaaacacaaaaaaaaaaaatgcaaaaaaaaaaaatcgaaaaaaaaaaaatctaaaaaaaaaaaacgaaaaaaaaaaaacccaaaaaaaaaaaagacaaaaaaaaaaaatagaaaaaaaaaaagttaaaaaaaaaaaactgaaaaaaaaaaaatttaaaaaaaaaaaatctag

SEQ ID NO: 3006 - DNA, 5777 bp, synthetic construct
  misc_feature 1..5777: note = Synthetic
  source 1..5777: mol_type = other DNA
aggactcactatttgttttcgcgcccagttgcaaaaagtgtcgaagctcagaataaacgctcaactttggccggatctgccaccatgggcaagcggcccgccgccaccaagaaggccggccaggccaagaagaagaagtccggctccgagacccccggcacctccgagtccgccacccccgagtccggcaagggcgaccccaagaagccccggggcaagatgtcctcctacgccttcttcgtgcagacctgccgggaggagcacaagaagaagcaccccgacgcctccgtgaacttctccgagttctccaagaagtgctccgagcggtggaagaccatgtccgccaaggagaagggcaagttcgaggacatggccaaggccgacaaggcccggtacgagcgggagatgaagacctacatcccccccaagggcgagaccaagaagaagttcaaggaccccaacgcccccaagcggcccccctccgccttcttcctgttctgctccgagtaccggcccaagatcaagggcgagcaccccggcctgtccatcggcgacgtggccaagaagctgggcgagatgtggaacaacaccgccgccgacgacaagcagccctacgagaagaaggccgccaagctgaaggagaagtacgagaaggacatcgccgcctaccgggccaagggcaagcccgacgccgccaagaagggcgtggtgaaggccgagaagtccaagaagaagaagggcaccaaggactccaccaaggacatccccgagaccccctccaaggacggcaccaaggactccaccaaggacatccccgagaccccctccaaggacgacaagaagtactccatcggcctggacatcggcaccaactccgtgggctgggccgtgatcaccgacgagtacaaggtgccctccaagaagttcaaggtgctgggcaacaccgaccggcactccatcaagaagaacctgatcggcgccctgctgttcgactccggcgagaccgccgaggccacccggctgaagcggaccgcccggcggcggtacacccggcggaagaaccggatctgctacctgcaggagatcttctccaacgagatggccaaggtggacgactccttcttccaccggctggaggagtccttcctggtggaggaggacaagaagcacgagcggcaccccatcttcggcaacatcgtggacgaggtggcctaccacgagaagtaccccaccatctaccacctgcggaagaagctggtggactccaccgacaaggccgacctgcggctgatctacctggccctggcccacatgatcaagttccggggccacttcctgatcgagggcgacctgaaccccgacaactccgacgtggacaagctgttcatccagctggtgcagacctacaaccagctgttcgaggagaaccccatcaacgcctccggcgtggacgccaaggccatcctgtccgcccggctgtccaagtcccggcggctggagaacctgatcgcccagctgcccggcgagaagaagaacggcctgttcggcaacctgatcgccctgtccctgggcctgacccccaacttcaagtccaacttcgacctggccgaggacgccaagctgcagctgtccaaggacacctacgacgacgacctggacaacctgctggcccagatcggcgaccagtacgccgacctgttcctggccgccaagaacctgtccgacgccatcctgctgtccgacatcctgcgggtgaacaccgagatcaccaaggcccccctgtccgcctccatgatcaagcggtacgacgagcaccaccaggacctgaccctgctgaaggccctggtgcggcagcagctgcccgagaagtacaaggagatcttcttcgaccagtccaagaacggctacgccggctacatcgacggcggcgcctcccaggaggagttctacaagttcatcaagcccatcctggagaagatggacggcaccgaggagctgctggtgaagctgaaccgggaggacctgctgcggaagcagcggaccttcgacaacggctccatcccccaccagatccacctgggcgagctgcacgccatcctgcggcggcaggaggacttctaccccttcctgaaggacaaccgggagaagatcgagaagatcctgaccttccggatcccctactacgtgggccccctggcccggggcaactcccggttcgcctggatgacccggaagtccgaggagaccatcaccccctggaacttcgaggaggtggtggacaagggcgcctccgcccagtccttcatcgagcggatgaccaacttcgacaagaacctgcccaacgagaaggtgctgcccaagcactccctgctgtacgagtacttcaccgtgtacaacgagctgaccaaggtgaagtacgtgaccgagggcatgcggaagcccgccttcctgtccggcgagcagaagaaggccatcgtggacctgctgttcaagaccaaccggaaggtgaccgtgaagcagctgaaggaggactacttcaagaagatcgagtgcttcgactccgtggagatctccggcgtggaggaccggttcaacgcctccctgggcacctaccacgacctgctgaagatcatcaaggacaaggacttcctggacaacgaggagaacgaggacatcctggaggacatcgtgctgaccctgaccctgttcgaggaccgggagatgatcgaggagcggctgaagacctacgcccacctgttcgacgacaaggtgatgaagcagctgaagcggcggcggtacaccggctggggccggctgtcccggaagctgatcaacggcatccgggacaagcagtccggcaagaccatcctggacttcctgaagtccgacggcttcgccaaccggaacttcatgcagctgatccacgacgactccctgaccttcaaggaggacatccagaaggcccaggtgtccggccagggcgactccctgcacgagcacatcgccaacctggccggctcccccgccatcaagaagggcatcctgcagaccgtgaaggtggtggacgagctggtgaaggtgatgggccggcacaagcccgagaacatcgtgatcgagatggcccgggagaaccagaccacccagaagggccagaagaactcccgggagcggatgaagcggatcgaggagggcatcaaggagctgggctcccagatcctgaaggagcaccccgtggagaacacccagctgcagaacgagaagctgtacctgtactacctgcagaacggccgggacatgtacgtggaccaggagctggacatcaaccggctgtccgactacgacgtggacgccatcgtgccccagtccttcctgaaggacgactccatcgacaacaaggtgctgacccggtccgacaagaaccggggcaagtccgacaacgtgccctccgaggaggtggtgaagaagatgaagaactactggcggcagctgctgaacgccaagctgatcacccagcggaagttcgacaacctgaccaaggccgagcggggcggcctgtccgagctggacaaggccggcttcatcaagcggcagctggtggagacccggcagatcaccaagcacgtggcccagatcctggactcccggatgaacaccaagtacgacgagaacgacaagctgatccgggaggtgaaggtgatcaccctgaagtccaagctggtgtccgacttccggaaggacttccagttctacaaggtgcgggagatcaacaactaccaccacgcccacgacgcctacctgaacgccgtggtgggcaccgccctgatcaagaagtaccccaagctggagtccgagttcgtgtacggcgactacaaggtgtacgacgtgcggaagatgatcgccaagtccgagcaggagatcggcaaggccaccgccaagtacttcttctactccaacatcatgaacttcttcaagaccgagatcaccctggccaacggcgagatccggaagcggcccctgatcgagaccaacggcgagaccggcgagatcgtgtgggacaagggccgggacttcgccaccgtgcggaaggtgctgtccatgccccaggtgaacatcgtgaagaagaccgaggtgcagaccggcggcttctccaaggagtccatcctgcccaagcggaactccgacaagctgatcgcccggaagaaggactgggaccccaagaagtacggcggcttcgactcccccaccgtggcctactccgtgctggtggtggccaaggtggagaagggcaagtccaagaagctgaagtccgtgaaggagctgctgggcatcaccatcatggagcggtcctccttcgagaagaaccccatcgacttcctggaggccaagggctacaaggaggtgaagaaggacctgatcatcaagctgcccaagtactccctgttcgagctggagaacggccggaagcggatgctggcctccgccggcgagctgcagaagggcaacgagctggccctgccctccaagtacgtgaacttcctgtacctggcctcccactacgagaagctgaagggctcccccgaggacaacgagcagaagcagctgttcgtggagcagcacaagcactacctggacgagatcatcgagcagatctccgagttctccaagcgggtgatcctggccgacgccaacctggacaaggtgctgtccgcctacaacaagcaccgggacaagcccatccgggagcaggccgagaacatcatccacctgttcaccctgaccaacctgggcgcccccgccgccttcaagtacttcgacaccaccatcgaccggaagcggtacacctccaccaaggaggtgctggacgccaccctgatccaccagtccatcaccggcctgtacgagacccggatcgacctgtcccagctgggcggcgactccggcggctcccggggcaagtgcctgtcctacgacaccgagatcctgaccgtggagtacggcttcctgcccatcggcaagatcgtggaggagcggatcgagtgcaccgtgtacaccgtggacaagaacggcttcgtgtacacccagcccatcgcccagtggcacaaccgcggcgagcaggaggtgttcgagtactgcctggaggacggctccatcatccgcgccaccaaggaccacaagttcatgaccaccgacggccagatgctgcccatcgacgagatcttcgagcgcggcctggacctgaagcaggtggacggcctgccctagctagcaccagcctcaagaacacccgaatggagtctctaagctacataataccaacttacactttacaaaatgttgtcccccaaaatgtagccattcgtatctgctcctaataaaaagaaagtttcttcacattctctcgagaaaaaaaaaaaatggaaaaaaaaaaaacggaaaaaaaaaaaaggtaaaaaaaaaaaatataaaaaaaaaaaacataaaaaaaaaaaacgaaaaaaaaaaaacgtaaaaaaaaaaaactcaaaaaaaaaaaagataaaaaaaaaaaacctaaaaaaaaaaaatgtaaaaaaaaaaaagggaaaaaaaaaaaacgcaaaaaaaaaaaacacaaaaaaaaaaaatgcaaaaaaaaaaaatcgaaaaaaaaaaaatctaaaaaaaaaaaacgaaaaaaaaaaaacccaaaaaaaaaaaagacaaaaaaaaaaaatagaaaaaaaaaaagttaaaaaaaaaaaactgaaaaaaaaaaaatttaaaaaaaaaaaatctag

SEQ ID NO: 3007 - DNA, 5522 bp, synthetic construct
  misc_feature 1..5522: note = Synthetic
  source 1..5522: mol_type = other DNA
aggactcactatttgttttcgcgcccagttgcaaaaagtgtcgaagctcagaataaacgctcaactttggccggatctgccaccatgggcaagcggcccgccgccaccaagaaggccggccaggccaagaagaagaagtccggctccgagacccccggcacctccgagtccgccacccccgagtcccccaagcggaaggtgtcctccgccgagggcgccgccaaggaggagcccaagcggcggtccgcccggctgtccgccaagccccccgccaaggtggaggccaagcccaagaaggccgccgccaaggacaagtcctccgacaagaaggtgcagaccaagggcaagcggggcgccaagggcaagcaggccgaggtggccaaccaggagaccaaggaggacctgcccgccgagaacggcgagaccaagaccgaggagtcccccgcctccgacgaggccggcgagaaggaggccaagtccgacggcaccaaggactccaccaaggacatccccgagaccccctccaaggacggcaccaaggactccaccaaggacatccccgagaccccctccaaggacgacaagaagtactccatcggcctggacatcggcaccaactccgtgggctgggccgtgatcaccgacgagtacaaggtgccctccaagaagttcaaggtgctgggcaacaccgaccggcactccatcaagaagaacctgatcggcgccctgctgttcgactccggcgagaccgccgaggccacccggctgaagcggaccgcccggcggcggtacacccggcggaagaaccggatctgctacctgcaggagatcttctccaacgagatggccaaggtggacgactccttcttccaccggctggaggagtccttcctggtggaggaggacaagaagcacgagcggcaccccatcttcggcaacatcgtggacgaggtggcctaccacgagaagtaccccaccatctaccacctgcggaagaagctggtggactccaccgacaaggccgacctgcggctgatctacctggccctggcccacatgatcaagttccggggccacttcctgatcgagggcgacctgaaccccgacaactccgacgtggacaagctgttcatccagctggtgcagacctacaaccagctgttcgaggagaaccccatcaacgcctccggcgtggacgccaaggccatcctgtccgcccggctgtccaagtcccggcggctggagaacctgatcgcccagctgcccggcgagaagaagaacggcctgttcggcaacctgatcgccctgtccctgggcctgacccccaacttcaagtccaacttcgacctggccgaggacgccaagctgcagctgtccaaggacacctacgacgacgacctggacaacctgctggcccagatcggcgaccagtacgccgacctgttcctggccgccaagaacctgtccgacgccatcctgctgtccgacatcctgcgggtgaacaccgagatcaccaaggcccccctgtccgcctccatgatcaagcggtacgacgagcaccaccaggacctgaccctgctgaaggccctggtgcggcagcagctgcccgagaagtacaaggagatcttcttcgaccagtccaagaacggctacgccggctacatcgacggcggcgcctcccaggaggagttctacaagttcatcaagcccatcctggagaagatggacggcaccgaggagctgctggtgaagctgaaccgggaggacctgctgcggaagcagcggaccttcgacaacggctccatcccccaccagatccacctgggcgagctgcacgccatcctgcggcggcaggaggacttctaccccttcctgaaggacaaccgggagaagatcgagaagatcctgaccttccggatcccctactacgtgggccccctggcccggggcaactcccggttcgcctggatgacccggaagtccgaggagaccatcaccccctggaacttcgaggaggtggtggacaagggcgcctccgcccagtccttcatcgagcggatgaccaacttcgacaagaacctgcccaacgagaaggtgctgcccaagcactccctgctgtacgagtacttcaccgtgtacaacgagctgaccaaggtgaagtacgtgaccgagggcatgcggaagcccgccttcctgtccggcgagcagaagaaggccatcgtggacctgctgttcaagaccaaccggaaggtgaccgtgaagcagctgaaggaggactacttcaagaagatcgagtgcttcgactccgtggagatctccggcgtggaggaccggttcaacgcctccctgggcacctaccacgacctgctgaagatcatcaaggacaaggacttcctggacaacgaggagaacgaggacatcctggaggacatcgtgctgaccctgaccctgttcgaggaccgggagatgatcgaggagcggctgaagacctacgcccacctgttcgacgacaaggtgatgaagcagctgaagcggcggcggtacaccggctggggccggctgtcccggaagctgatcaacggcatccgggacaagcagtccggcaagaccatcctggacttcctgaagtccgacggcttcgccaaccggaacttcatgcagctgatccacgacgactccctgaccttcaaggaggacatccagaaggcccaggtgtccggccagggcgactccctgcacgagcacatcgccaacctggccggctcccccgccatcaagaagggcatcctgcagaccgtgaaggtggtggacgagctggtgaaggtgatgggccggcacaagcccgagaacatcgtgatcgagatggcccgggagaaccagaccacccagaagggccagaagaactcccgggagcggatgaagcggatcgaggagggcatcaaggagctgggctcccagatcctgaaggagcaccccgtggagaacacccagctgcagaacgagaagctgtacctgtactacctgcagaacggccgggacatgtacgtggaccaggagctggacatcaaccggctgtccgactacgacgtggacgccatcgtgccccagtccttcctgaaggacgactccatcgacaacaaggtgctgacccggtccgacaagaaccggggcaagtccgacaacgtgccctccgaggaggtggtgaagaagatgaagaactactggcggcagctgctgaacgccaagctgatcacccagcggaagttcgacaacctgaccaaggccgagcggggcggcctgtccgagctggacaaggccggcttcatcaagcggcagctggtggagacccggcagatcaccaagcacgtggcccagatcctggactcccggatgaacaccaagtacgacgagaacgacaagctgatccgggaggtgaaggtgatcaccctgaagtccaagctggtgtccgacttccggaaggacttccagttctacaaggtgcgggagatcaacaactaccaccacgcccacgacgcctacctgaacgccgtggtgggcaccgccctgatcaagaagtaccccaagctggagtccgagttcgtgtacggcgactacaaggtgtacgacgtgcggaagatgatcgccaagtccgagcaggagatcggcaaggccaccgccaagtacttcttctactccaacatcatgaacttcttcaagaccgagatcaccctggccaacggcgagatccggaagcggcccctgatcgagaccaacggcgagaccggcgagatcgtgtgggacaagggccgggacttcgccaccgtgcggaaggtgctgtccatgccccaggtgaacatcgtgaagaagaccgaggtgcagaccggcggcttctccaaggagtccatcctgcccaagcggaactccgacaagctgatcgcccggaagaaggactgggaccccaagaagtacggcggcttcgactcccccaccgtggcctactccgtgctggtggtggccaaggtggagaagggcaagtccaagaagctgaagtccgtgaaggagctgctgggcatcaccatcatggagcggtcctccttcgagaagaaccccatcgacttcctggaggccaagggctacaaggaggtgaagaaggacctgatcatcaagctgcccaagtactccctgttcgagctggagaacggccggaagcggatgctggcctccgccggcgagctgcagaagggcaacgagctggccctgccctccaagtacgtgaacttcctgtacctggcctcccactacgagaagctgaagggctcccccgaggacaacgagcagaagcagctgttcgtggagcagcacaagcactacctggacgagatcatcgagcagatctccgagttctccaagcgggtgatcctggccgacgccaacctggacaaggtgctgtccgcctacaacaagcaccgggacaagcccatccgggagcaggccgagaacatcatccacctgttcaccctgaccaacctgggcgcccccgccgccttcaagtacttcgacaccaccatcgaccggaagcggtacacctccaccaaggaggtgctggacgccaccctgatccaccagtccatcaccggcctgtacgagacccggatcgacctgtcccagctgggcggcgactccggcggctcccggggcaagtgcctgtcctacgacaccgagatcctgaccgtggagtacggcttcctgcccatcggcaagatcgtggaggagcggatcgagtgcaccgtgtacaccgtggacaagaacggcttcgtgtacacccagcccatcgcccagtggcacaaccgcggcgagcaggaggtgttcgagtactgcctggaggacggctccatcatccgcgccaccaaggaccacaagttcatgaccaccgacggccagatgctgcccatcgacgagatcttcgagcgcggcctggacctgaagcaggtggacggcctgccctagctagcaccagcctcaagaacacccgaatggagtctctaagctacataataccaacttacactttacaaaatgttgtcccccaaaatgtagccattcgtatctgctcctaataaaaagaaagtttcttcacattctctcgagaaaaaaaaaaaatggaaaaaaaaaaaacggaaaaaaaaaaaaggtaaaaaaaaaaaatataaaaaaaaaaaacataaaaaaaaaaaacgaaaaaaaaaaaacgtaaaaaaaaaaaactcaaaaaaaaaaaagataaaaaaaaaaaacctaaaaaaaaaaaatgtaaaaaaaaaaaagggaaaaaaaaaaaacgcaaaaaaaaaaaacacaaaaaaaaaaaatgcaaaaaaaaaaaatcgaaaaaaaaaaaatctaaaaaaaaaaaacgaaaaaaaaaaaacccaaaaaaaaaaaagacaaaaaaaaaaaatagaaaaaaaaaaagttaaaaaaaaaaaactgaaaaaaaaaaaatttaaaaaaaaaaaatctag

SEQ ID NO: 3008 - DNA, 5081 bp, synthetic construct
  misc_feature 1..5081: note = Synthetic
  source 1..5081: mol_type = other DNA
aggactcactatttgttttcgcgcccagttgcaaaaagtgtcgaagctcagaataaacgctcaactttggccggatctgccaccatgggcaagcggcccgccgccaccaagaaggccggccaggccaagaagaagaaggacaagaagtactccatcggcctggacatcggcaccaactccgtgggctgggccgtgatcaccgacgagtacaaggtgccctccaagaagttcaaggtgctgggcaacaccgaccggcactccatcaagaagaacctgatcggcgccctgctgttcgactccggcgagaccgccgaggccacccggctgaagcggaccgcccggcggcggtacacccggcggaagaaccggatctgctacctgcaggagatcttctccaacgagatggccaaggtggacgactccttcttccaccggctggaggagtccttcctggtggaggaggacaagaagcacgagcggcaccccatcttcggcaacatcgtggacgaggtggcctaccacgagaagtaccccaccatctaccacctgcggaagaagctggtggactccaccgacaaggccgacctgcggctgatctacctggccctggcccacatgatcaagttccggggccacttcctgatcgagggcgacctgaaccccgacaactccgacgtggacaagctgttcatccagctggtgcagacctacaaccagctgttcgaggagaaccccatcaacgcctccggcgtggacgccaaggccatcctgtccgcccggctgtccaagtcccggcggctggagaacctgatcgcccagctgcccggcgagaagaagaacggcctgttcggcaacctgatcgccctgtccctgggcctgacccccaacttcaagtccaacttcgacctggccgaggacgccaagctgcagctgtccaaggacacctacgacgacgacctggacaacctgctggcccagatcggcgaccagtacgccgacctgttcctggccgccaagaacctgtccgacgccatcctgctgtccgacatcctgcgggtgaacaccgagatcaccaaggcccccctgtccgcctccatgatcaagcggtacgacgagcaccaccaggacctgaccctgctgaaggccctggtgcggcagcagctgcccgagaagtacaaggagatcttcttcgaccagtccaagaacggctacgccggctacatcgacggcggcgcctcccaggaggagttctacaagttcatcaagcccatcctggagaagatggacggcaccgaggagctgctggtgaagctgaaccgggaggacctgctgcggaagcagcggaccttcgacaacggctccatcccccaccagatccacctgggcgagctgcacgccatcctgcggcggcaggaggacttctaccccttcctgaaggacaaccgggagaagatcgagaagatcctgaccttccggatcccctactacgtgggccccctggcccggggcaactcccggttcgcctggatgacccggaagtccgaggagaccatcaccccctggaacttcgaggaggtggtggacaagggcgcctccgcccagtccttcatcgagcggatgaccaacttcgacaagaacctgcccaacgagaaggtgctgcccaagcactccctgctgtacgagtacttcaccgtgtacaacgagctgaccaaggtgaagtacgtgaccgagggcatgcggaagcccgccttcctgtccggcgagcagaagaaggccatcgtggacctgctgttcaagaccaaccggaaggtgaccgtgaagcagctgaaggaggactacttcaagaagatcgagtgcttcgactccgtggagatctccggcgtggaggaccggttcaacgcctccctgggcacctaccacgacctgctgaagatcatcaaggacaaggacttcctggacaacgaggagaacgaggacatcctggaggacatcgtgctgaccctgaccctgttcgaggaccgggagatgatcgaggagcggctgaagacctacgcccacctgttcgacgacaaggtgatgaagcagctgaagcggcggcggtacaccggctggggccggctgtcccggaagctgatcaacggcatccgggacaagcagtccggcaagaccatcctggacttcctgaagtccgacggcttcgccaaccggaacttcatgcagctgatccacgacgactccctgaccttcaaggaggacatccagaaggcccaggtgtccggccagggcgactccctgcacgagcacatcgccaacctggccggctcccccgccatcaagaagggcatcctgcagaccgtgaaggtggtggacgagctggtgaaggtgatgggccggcacaagcccgagaacatcgtgatcgagatggcccgggagaaccagaccacccagaagggccagaagaactcccgggagcggatgaagcggatcgaggagggcatcaaggagctgggctcccagatcctgaaggagcaccccgtggagaacacccagctgcagaacgagaagctgtacctgtactacctgcagaacggccgggacatgtacgtggaccaggagctggacatcaaccggctgtccgactacgacgtggacgccatcgtgccccagtccttcctgaaggacgactccatcgacaacaaggtgctgacccggtccgacaagaaccggggcaagtccgacaacgtgccctccgaggaggtggtgaagaagatgaagaactactggcggcagctgctgaacgccaagctgatcacccagcggaagttcgacaacctgaccaaggccgagcggggcggcctgtccgagctggacaaggccggcttcatcaagcggcagctggtggagacccggcagatcaccaagcacgtggcccagatcctggactcccggatgaacaccaagtacgacgagaacgacaagctgatccgggaggtgaaggtgatcaccctgaagtccaagctggtgtccgacttccggaaggacttccagttctacaaggtgcgggagatcaacaactaccaccacgcccacgacgcctacctgaacgccgtggtgggcaccgccctgatcaagaagtaccccaagctggagtccgagttcgtgtacggcgactacaaggtgtacgacgtgcggaagatgatcgccaagtccgagcaggagatcggcaaggccaccgccaagtacttcttctactccaacatcatgaacttcttcaagaccgagatcaccctggccaacggcgagatccggaagcggcccctgatcgagaccaacggcgagaccggcgagatcgtgtgggacaagggccgggacttcgccaccgtgcggaaggtgctgtccatgccccaggtgaacatcgtgaagaagaccgaggtgcagaccggcggcttctccaaggagtccatcctgcccaagcggaactccgacaagctgatcgcccggaagaaggactgggaccccaagaagtacggcggcttcgactcccccaccgtggcctactccgtgctggtggtggccaaggtggagaagggcaagtccaagaagctgaagtccgtgaaggagctgctgggcatcaccatcatggagcggtcctccttcgagaagaaccccatcgacttcctggaggccaagggctacaaggaggtgaagaaggacctgatcatcaagctgcccaagtactccctgttcgagctggagaacggccggaagcggatgctggcctccgccggcgagctgcagaagggcaacgagctggccctgccctccaagtacgtgaacttcctgtacctggcctcccactacgagaagctgaagggctcccccgaggacaacgagcagaagcagctgttcgtggagcagcacaagcactacctggacgagatcatcgagcagatctccgagttctccaagcgggtgatcctggccgacgccaacctggacaaggtgctgtccgcctacaacaagcaccgggacaagcccatccgggagcaggccgagaacatcatccacctgttcaccctgaccaacctgggcgcccccgccgccttcaagtacttcgacaccaccatcgaccggaagcggtacacctccaccaaggaggtgctggacgccaccctgatccaccagtccatcaccggcctgtacgagacccggatcgacctgtcccagctgggcggcgactccggcggctcccggggcaagtgcctgtcctacgacaccgagatcctgaccgtggagtacggcttcctgcccatcggcaagatcgtggaggagcggatcgagtgcaccgtgtacaccgtggacaagaacggcttcgtgtacacccagcccatcgcccagtggcacaaccgcggcgagcaggaggtgttcgagtactgcctggaggacggctccatcatccgcgccaccaaggaccacaagttcatgaccaccgacggccagatgctgcccatcgacgagatcttcgagcgcggcctggacctgaagcaggtggacggcctgccctagctagcaccagcctcaagaacacccgaatggagtctctaagctacataataccaacttacactttacaaaatgttgtcccccaaaatgtagccattcgtatctgctcctaataaaaagaaagtttcttcacattctctcgagaaaaaaaaaaaatggaaaaaaaaaaaacggaaaaaaaaaaaaggtaaaaaaaaaaaatataaaaaaaaaaaacataaaaaaaaaaaacgaaaaaaaaaaaacgtaaaaaaaaaaaactcaaaaaaaaaaaagataaaaaaaaaaaacctaaaaaaaaaaaatgtaaaaaaaaaaaagggaaaaaaaaaaaacgcaaaaaaaaaaaacacaaaaaaaaaaaatgcaaaaaaaaaaaatcgaaaaaaaaaaaatctaaaaaaaaaaaacgaaaaaaaaaaaacccaaaaaaaaaaaagacaaaaaaaaaaaatagaaaaaaaaaaagttaaaaaaaaaaaactgaaaaaaaaaaaatttaaaaaaaaaaaatctag

SEQ ID NO: 3009 - DNA, 2486 bp, synthetic construct
  misc_feature 1..2486: note = Synthetic
  source 1..2486: mol_type = other DNA
aggactcactatttgttttcgcgcccagttgcaaaaagtgtcgaagctcagaataaacgctcaactttggccggatctgccaccatgggcgtgaagatcatctcccgcaagtccctgggcacccagaacgtgtacgacatcggcgtggagaaggaccacaacttcctgctgaagaacggcctggtggcctccaactgcttcaactccggcggctccaagcggaccgccgacggctccgagttcgagtcccccaagaagaagcggaaggtgtccggcggctcctccggcggctccatggactccaccaaggagaagtgcgactcctacaaggacgacctgctgctgcggatgggcctgaacgacaacaaggccggcatggagggcctggacaaggagaagatcaacaagatcatcatggaggccaccaagggctcccggttctacggcaacgagctgaagaaggagaagcaggtgaaccagcggatcgagaacatgatgcagcagaaggcccagatcacctcccagcagctgcggaaggcccagctgcaggtggaccggttcgccatggagctggagcagtcccggaacctgtccaacaccatcgtgcacatcgacatggacgccttctacgccgccgtggagatgcgggacaaccccgagctgaaggacaagcccatcgccgtgggctccatgtccatgctgtccacctccaactaccacgcccggcggttcggcgtgcgggccgccatgcccggcttcatcgccaagcggctgtgcccccagctgatcatcgtgccccccaacttcgacaagtaccgggccgtgtccaaggaggtgaaggagatcctggccgactacgaccccaacttcatggccatgtccctggacgaggcctacctgaacatcaccaagcacctggaggagcggcagaactggcccgaggacaagcggcggtacttcatcaagatgggctcctccgtggagaacgacaaccccggcaaggaggtgaacaagctgtccgagcacgagcggtccatctcccccctgctgttcgaggagtccccctccgacgtgcagccccccggcgaccccttccaggtgaacttcgaggagcagaacaacccccagatcctgcagaactccgtggtgttcggcacctccgcccaggaggtggtgaaggagatccggttccggatcgagcagaagaccaccctgaccgcctccgccggcatcgcccccaacaccatgctggccaaggtgtgctccgacaagaacaagcccaacggccagtaccagatcctgcccaaccggcaggccgtgatggacttcatcaaggacctgcccatccggaaggtgtccggcatcggcaaggtgaccgagaagatgctgaaggccctgggcatcatcacctgcaccgagctgtaccagcagcgggccctgctgtccctgctgttctccgagacctcctggcactacttcctgcacatctccctgggcctgggctccacccacctgacccgggaccgggtgcggaagtccatgtccgtggagcggaccttctccgagatcaacaaggccgaggagcagtactccctgtgccaggagctgtgctccgagctggcccaggacctgcagaaggagcggctgaagggccggaccgtgaccatcaagctgaagaacgtgaacttcgaggtgaagacccgggcctccaccgtgtcctccgtggtgtccaccgccgaggagatcttcgccatcgccaaggagctgctgaagaccgagatcgacgccgacttcccccaccccctgcggctgcggctgatgggcgtgcggatctcctccttccccaacgaggaggaccggaagcaccagcagggcggcggctccggcaagcggaccgccgacggctccggcggcggctcccccaagaagaagcggaaggtgcccgccgccaagcgcgtgaagctggactagctagcaccagcctcaagaacacccgaatggagtctctaagctacataataccaacttacactttacaaaatgttgtcccccaaaatgtagccattcgtatctgctcctaataaaaagaaagtttcttcacattctctcgagaaaaaaaaaaaatggaaaaaaaaaaaacggaaaaaaaaaaaaggtaaaaaaaaaaaatataaaaaaaaaaaacataaaaaaaaaaaacgaaaaaaaaaaaacgtaaaaaaaaaaaactcaaaaaaaaaaaagataaaaaaaaaaaacctaaaaaaaaaaaatgtaaaaaaaaaaaagggaaaaaaaaaaaacgcaaaaaaaaaaaacacaaaaaaaaaaaatgcaaaaaaaaaaaatcgaaaaaaaaaaaatctaaaaaaaaaaaacgaaaaaaaaaaaacccaaaaaaaaaaaagacaaaaaaaaaaaatagaaaaaaaaaaagttaaaaaaaaaaaactgaaaaaaaaaaaatttaaaaaaaaaaaatctag

SEQ ID NO: 3010 - DNA, 5108 bp, synthetic construct; identical to SEQ ID NO: 1912
  misc_feature 1..5108: note = Synthetic
  source 1..5108: mol_type = other DNA

SEQ ID NO: 3011 - DNA, 2408 bp, synthetic construct; identical to SEQ ID NO: 1915
  misc_feature 1..2408: note = Synthetic
  source 1..2408: mol_type = other DNA

SEQ ID NO: 3012 - DNA, 5084 bp, synthetic construct; identical to SEQ ID NO: 1906
  misc_feature 1..5084: note = Synthetic
  source 1..5084: mol_type = other DNA

SEQ ID NO: 3013 - DNA, 2486 bp, synthetic construct; identical to SEQ ID NO: 1909
  misc_feature 1..2486: note = Synthetic
  source 1..2486: mol_type = other DNA

SEQ ID NO: 3014 - DNA, 2897 bp, synthetic construct; identical to SEQ ID NO: 1900
  misc_feature 1..2897: note = Synthetic
  source 1..2897: mol_type = other DNA

SEQ ID NO: 3015 - DNA, 3941 bp, synthetic construct; identical to SEQ ID NO: 1903
  misc_feature 1..3941: note = Synthetic
  source 1..3941: mol_type = other DNA

SEQ ID NO: 3016 - DNA, 3530 bp, synthetic construct; identical to SEQ ID NO: 1918
  misc_feature 1..3530: note = Synthetic
  source 1..3530: mol_type = other DNA

SEQ ID NO: 3017 - RNA, 3137 nt, synthetic construct; identical to SEQ ID NO: 1939
  misc_feature 1..3137: note = Synthetic
  source 1..3137: mol_type = other RNA

SEQ ID NO: 3018 - RNA, 3800 nt, synthetic construct; identical to SEQ ID NO: 1942
  misc_feature 1..3800: note = Synthetic
  source 1..3800: mol_type = other RNA

SEQ ID NO: 3019 - RNA, 4463 nt, synthetic construct; identical to SEQ ID NO: 1945
  misc_feature 1..4463: note = Synthetic
  source 1..4463: mol_type = other RNA

SEQ ID NO: 3020 - RNA, 4592 nt, synthetic construct; identical to SEQ ID NO: 1948
  misc_feature 1..4592: note = Synthetic
  source 1..4592: mol_type = other RNA

SEQ ID NO: 3021 - RNA, 5450 nt, synthetic construct; identical to SEQ ID NO: 1951
  misc_feature 1..5450: note = Synthetic
  source 1..5450: mol_type = other RNA

SEQ ID NO: 3022 - RNA, 5579 nt, synthetic construct; identical to SEQ ID NO: 1954
  misc_feature 1..5579: note = Synthetic
  source 1..5579: mol_type = other RNA

SEQ ID NO: 3023-3500 - skipped (478 entries)

SEQ ID NO: 3501 - DNA, 1823 bp, synthetic construct
  misc_feature 1..1823: note = Synthetic
  source 1..1823: mol_type = other DNA
gggaagctcagaataaacgctcaactttggccggatctgccaccatgggcatccagggcctggccaagctgatcgccgacgtggccccctccgccatccgggagaacgacatcaagtcctacttcggccggaaggtggccatcgacgcctccatgtccatctaccagttcctgatcgccgtgcggcagggcggcgacgtgctgcagaacgaggagggcgagaccacctcccacctgatgggcatgttctaccggaccatccggatgatggagaacggcatcaagcccgtgtacgtgttcgacggcaagcccccccagctgaagtccggcgagctggccaagcggtccgagcggcgggccgaggccgagaagcagctgcagcaggcccaggccgccggcgccgagcaggaggtggagaagttcaccaagcggctggtgaaggtgaccaagcagcacaacgacgagtgcaagcacctgctgtccctgatgggcatcccctacctggacgccccctccgaggccgaggcctcctgcgccgccctggtgaaggccggcaaggtgtacgccgccgccaccgaggacatggactgcctgaccttcggctcccccgtgctgatgcggcacctgaccgcctccgaggccaagaagctgcccatccaggagttccacctgtcccggatcctgcaggagctgggcctgaaccaggagcagttcgtggacctgtgcatcctgctgggctccgactactgcgagtccatccggggcatcggccccaagcgggccgtggacctgatccagaagcacaagtccatcgaggagatcgtgcggcggctggaccccaacaagtaccccgtgcccgagaactggctgcacaaggaggcccaccagctgttcctggagcccgaggtgctggaccccgagtccgtggagctgaagtggtccgagcccaacgaggaggagctgatcaagttcatgtgcggcgagaagcagttctccgaggagcggatccggtccggcgtgaagcggctgtccaagtcccggcagggctccacccagggccggctggacgacttcttcaaggtgaccggctccctgtcctccgccaagcggaaggagcccgagcccaagggctccaccaagaagaaggccaagaccggcgccgccggcaagttcaagcggggcaagtccggcggctccaagcggaccgccgacggctccgagttcgagcccaagaagaagcggaaggtgtccgagtccgccacccccgagtccgtgtccggctggcggctgttcaagaagatctcctagctagcaccagcctcaagaacacccgaatggagtctctaagctacataataccaacttacactttacaaaatgttgtcccccaaaatgtagccattcgtatctgctcctaataaaaagaaagtttcttcacattctctcgagaaaaaaaaaaaatggaaaaaaaaaaaacggaaaaaaaaaaaaggtaaaaaaaaaaaatataaaaaaaaaaaacataaaaaaaaaaaacgaaaaaaaaaaaacgtaaaaaaaaaaaactcaaaaaaaaaaaagataaaaaaaaaaaacctaaaaaaaaaaaatgtaaaaaaaaaaaagggaaaaaaaaaaaacgcaaaaaaaaaaaacacaaaaaaaaaaaatgcaaaaaaaaaaaatcgaaaaaaaaaaaatctaaaaaaaaaaaacgaaaaaaaaaaaacccaaaaaaaaaaaagacaaaaaaaaaaaatagaaaaaaaaaaaagttaaaaaaaaaaaactgaaaaaaaaaaaatttaaaaaaaaaaaatctag

SEQ ID NO: 3502 - DNA, 1743 bp, synthetic construct
  misc_feature 1..1743: note = Synthetic
  source 1..1743: mol_type = other DNA
aggactcactatttgttttcgcgcccagttgcaaaaagtgtcgaagctcagaataaacgctcaactttggccggatctgccaccatgggcatccagggcctggccaagctgatcgccgacgtggccccctccgccatccgggagaacgacatcaagtcctacttcggccggaaggtggccatcgacgcctccatgtccatctaccagttcctgatcgccgtgcggcagggcggcgacgtgctgcagaacgaggagggcgagaccacctcccacctgatgggcatgttctaccggaccatccggatgatggagaacggcatcaagcccgtgtacgtgttcgacggcaagcccccccagctgaagtccggcgagctggccaagcggtccgagcggcgggccgaggccgagaagcagctgcagcaggcccaggccgccggcgccgagcaggaggtggagaagttcaccaagcggctggtgaaggtgaccaagcagcacaacgacgagtgcaagcacctgctgtccctgatgggcatcccctacctggacgccccctccgaggccgaggcctcctgcgccgccctggtgaaggccggcaaggtgtacgccgccgccaccgaggacatggactgcctgaccttcggctcccccgtgctgatgcggcacctgaccgcctccgaggccaagaagctgcccatccaggagttccacctgtcccggatcctgcaggagctgggcctgaaccaggagcagttcgtggacctgtgcatcctgctgggctccgactactgcgagtccatccggggcatcggccccaagcgggccgtggacctgatccagaagcacaagtccatcgaggagatcgtgcggcggctggaccccaacaagtaccccgtgcccgagaactggctgcacaaggaggcccaccagctgttcctggagcccgaggtgctggaccccgagtccgtggagctgaagtggtccgagcccaacgaggaggagctgatcaagttcatgtgcggcgagaagcagttctccgaggagcggatccggtccggcgtgaagcggctgtccaagtcccggcagggctccacccagggccggctggacgacttcttcaaggtgaccggctccctgtcctccgccaagcggaaggagcccgagcccaagggctccaccaagaagaaggccaagaccggcgccgccggcaagttcaagcggggcaagtagctagcaccagcctcaagaacacccgaatggagtctctaagctacataataccaacttacactttacaaaatgttgtcccccaaaatgtagccattcgtatctgctcctaataaaaagaaagtttcttcacattctctcgagaaaaaaaaaaaatggaaaaaaaaaaaacggaaaaaaaaaaaaggtaaaaaaaaaaaatataaaaaaaaaaaacataaaaaaaaaaaacgaaaaaaaaaaaacgtaaaaaaaaaaaactcaaaaaaaaaaaagataaaaaaaaaaaacctaaaaaaaaaaaatgtaaaaaaaaaaaagggaaaaaaaaaaaacgcaaaaaaaaaaaacacaaaaaaaaaaaatgcaaaaaaaaaaaatcgaaaaaaaaaaaatctaaaaaaaaaaaacgaaaaaaaaaaaacccaaaaaaaaaaaagacaaaaaaaaaaaatagaaaaaaaaaaaagttaaaaaaaaaaaactgaaaaaaaaaaaatttaaaaaaaaaaaatctag

SEQ ID NO: 3503 - DNA, 1822 bp, synthetic construct
  misc_feature 1..1822: note = Synthetic
  source 1..1822: mol_type = other DNA
aggaagctcagaataaacgctcaactttggccggatctgccaccatgggcatccagggcctggccaagctgatcgccgacgtggccccctccgccatccgggagaacgacatcaagtcctacttcggccggaaggtggccatcgacgcctccatgtccatctaccagttcctgatcgccgtgcggcagggcggcgacgtgctgcagaacgaggagggcgagaccacctcccacctgatgggcatgttctaccggaccatccggatgatggagaacggcatcaagcccgtgtacgtgttcgacggcaagcccccccagctgaagtccggcgagctggccaagcggtccgagcggcgggccgaggccgagaagcagctgcagcaggcccaggccgccggcgccgagcaggaggtggagaagttcaccaagcggctggtgaaggtgaccaagcagcacaacgacgagtgcaagcacctgctgtccctgatgggcatcccctacctggacgccccctccgaggccgaggcctcctgcgccgccctggtgaaggccggcaaggtgtacgccgccgccaccgaggacatggactgcctgaccttcggctcccccgtgctgatgcggcacctgaccgcctccgaggccaagaagctgcccatccaggagttccacctgtcccggatcctgcaggagctgggcctgaaccaggagcagttcgtggacctgtgcatcctgctgggctccgactactgcgagtccatccggggcatcggccccaagcgggccgtggacctgatccagaagcacaagtccatcgaggagatcgtgcggcggctggaccccaacaagtaccccgtgcccgagaactggctgcacaaggaggcccaccagctgttcctggagcccgaggtgctggaccccgagtccgtggagctgaagtggtccgagcccaacgaggaggagctgatcaagttcatgtgcggcgagaagcagttctccgaggagcggatccggtccggcgtgaagcggctgtccaagtcccggcagggctccacccagggccggctggacgacttcttcaaggtgaccggctccctgtcctccgccaagcggaaggagcccgagcccaagggctccaccaagaagaaggccaagaccggcgccgccggcaagttcaagcggggcaagtccggcggctccaagcggaccgccgacggctccgagttcgagcccaagaagaagcggaaggtgtccgagtccgccacccccgagtccgtgtccggctggcggctgttcaagaagatctcctagctagcaccagcctcaagaacacccgaatggagtctctaagctacataataccaacttacactttacaaaatgttgtcccccaaaatgtagccattcgtatctgctcctaataaaaagaaagtttcttcacattctctcgagaaaaaaaaaaaatggaaaaaaaaaaaacggaaaaaaaaaaaaggtaaaaaaaaaaaatataaaaaaaaaaaacataaaaaaaaaaaacgaaaaaaaaaaaacgtaaaaaaaaaaaactcaaaaaaaaaaaagataaaaaaaaaaaacctaaaaaaaaaaaatgtaaaaaaaaaaaagggaaaaaaaaaaaacgcaaaaaaaaaaaacacaaaaaaaaaaaatgcaaaaaaaaaaaatcgaaaaaaaaaaaatctaaaaaaaaaaaacgaaaaaaaaaaaacccaaaaaaaaaaaagacaaaaaaaaaaaatagaaaaaaaaaaagttaaaaaaaaaaaactgaaaaaaaaaaaatttaaaaaaaaaaaatctag

SEQ ID NO: 3504 - DNA, 1553 bp, synthetic construct
  misc_feature 1..1553: note = Synthetic
  source 1..1553: mol_type = other DNA
aggaagctcagaataaacgctcaactttggccggatctgccaccatgggcatccagggcctggccaagctgatcgccgacgtggccccctccgccatccgggagaacgacatcaagtcctacttcggccggaaggtggccatcgacgcctccatgtccatctaccagttcctgatcgccgtgcggcagggcggcgacgtgctgcagaacgaggagggcgagaccacctcccacctgatgggcatgttctaccggaccatccggatgatggagaacggcatcaagcccgtgtacgtgttcgacggcaagcccccccagctgaagtccggcgagctggccaagcggtccgagcggcgggccgaggccgagaagcagctgcagcaggcccaggccgccggcgccgagcaggaggtggagaagttcaccaagcggctggtgaaggtgaccaagcagcacaacgacgagtgcaagcacctgctgtccctgatgggcatcccctacctggacgccccctccgaggccgaggcctcctgcgccgccctggtgaaggccggcaaggtgtacgccgccgccaccgaggacatggactgcctgaccttcggctcccccgtgctgatgcggcacctgaccgcctccgaggccaagaagctgcccatccaggagttccacctgtcccggatcctgcaggagctgggcctgaaccaggagcagttcgtggacctgtgcatcctgctgggctccgactactgcgagtccatccggggcatcggccccaagcgggccgtggacctgatccagaagcacaagtccatcgaggagatcgtgcggcggctggaccccaacaagtaccccgtgcccgagaactggctgcacaaggaggcccaccagctgttcctggagcccgaggtgctggaccccgagtccgtggagctgaagtggtccgagcccaacgaggaggagctgatcaagttcatgtgcggcgagaagcagttctccgaggagcggatccggtccggcgtgaagcggctgtccaagtcccggcagggctccacccagggccggctggacgacttcttcaaggtgaccggctccctgtcctccgccaagcggaaggagcccgagcccaagggctccaccaagaagaaggccaagaccggcgccgccggcaagttcaagcggggcaagtccggcggctccaagcggaccgccgacggctccgagttcgagcccaagaagaagcggaaggtgtccgagtccgccacccccgagtccgtgtccggctggcggctgttcaagaagatctcctagctagcaccagcctcaagaacacccgaatggagtctctaagctacataataccaacttacactttacaaaatgttgtcccccaaaatgtagccattcgtatctgctcctaataaaaagaaagtttcttcacattctctcgagaaaaaaaaaaaaaaaaaaaaaaaaaaaaaaaaaaaaaaaaaaaaaaaaaaaaaaaaaaaaaaaaaaaaaaaaaaaaaaaaaaaaaaaaaaaaaaaaaaaatctag

SEQ ID NO: 3505 - DNA, 1862 bp, synthetic construct
  misc_feature 1..1862: note = Synthetic
  source 1..1862: mol_type = other DNA
aggactcactatttgttttcgcgcccagttgcaaaaagtgtcgaagctcagaataaacgctcaactttggccggatctgccaccatgggcatccagggcctggccaagctgatcgccgacgtggccccctccgccatccgggagaacgacatcaagtcctacttcggccggaaggtggccatcgacgcctccatgtccatctaccagttcctgatcgccgtgcggcagggcggcgacgtgctgcagaacgaggagggcgagaccacctcccacctgatgggcatgttctaccggaccatccggatgatggagaacggcatcaagcccgtgtacgtgttcgacggcaagcccccccagctgaagtccggcgagctggccaagcggtccgagcggcgggccgaggccgagaagcagctgcagcaggcccaggccgccggcgccgagcaggaggtggagaagttcaccaagcggctggtgaaggtgaccaagcagcacaacgacgagtgcaagcacctgctgtccctgatgggcatcccctacctggacgccccctccgaggccgaggcctcctgcgccgccctggtgaaggccggcaaggtgtacgccgccgccaccgaggacatggactgcctgaccttcggctcccccgtgctgatgcggcacctgaccgcctccgaggccaagaagctgcccatccaggagttccacctgtcccggatcctgcaggagctgggcctgaaccaggagcagttcgtggacctgtgcatcctgctgggctccgactactgcgagtccatccggggcatcggccccaagcgggccgtggacctgatccagaagcacaagtccatcgaggagatcgtgcggcggctggaccccaacaagtaccccgtgcccgagaactggctgcacaaggaggcccaccagctgttcctggagcccgaggtgctggaccccgagtccgtggagctgaagtggtccgagcccaacgaggaggagctgatcaagttcatgtgcggcgagaagcagttctccgaggagcggatccggtccggcgtgaagcggctgtccaagtcccggcagggctccacccagggccggctggacgacttcttcaaggtgaccggctccctgtcctccgccaagcggaaggagcccgagcccaagggctccaccaagaagaaggccaagaccggcgccgccggcaagttcaagcggggcaagtccggcggctccaagcggaccgccgacggctccgagttcgagcccaagaagaagcggaaggtgtccgagtccgccacccccgagtccgtgtccggctggcggctgttcaagaagatctcctagctagcaccagcctcaagaacacccgaatggagtctctaagctacataataccaacttacactttacaaaatgttgtcccccaaaatgtagccattcgtatctgctcctaataaaaagaaagtttcttcacattctctcgagaaaaaaaaaaaatggaaaaaaaaaaaacggaaaaaaaaaaaaggtaaaaaaaaaaaatataaaaaaaaaaaacataaaaaaaaaaaacgaaaaaaaaaaaacgtaaaaaaaaaaaactcaaaaaaaaaaaagataaaaaaaaaaaacctaaaaaaaaaaaatgtaaaaaaaaaaaagggaaaaaaaaaaaacgcaaaaaaaaaaaacacaaaaaaaaaaaatgcaaaaaaaaaaaatcgaaaaaaaaaaaatctaaaaaaaaaaaacgaaaaaaaaaaaacccaaaaaaaaaaaagacaaaaaaaaaaaatagaaaaaaaaaaagttaaaaaaaaaaaactgaaaaaaaaaaaatttaaaaaaaaaaaatctag

SEQ ID NO: 3506 - DNA, 1916 bp, synthetic construct
  misc_feature 1..1916: note = Synthetic
  source 1..1916: mol_type = other DNA
aggaagctcagaataaacgctcaactttggccggatctgccaccatgggcatccagggcctggccaagctgatcgccgacgtggccccctccgccatccgggagaacgacatcaagtcctacttcggccggaaggtggccatcgacgcctccatgtccatctaccagttcctgatcgccgtgcggcagggcggcgacgtgctgcagaacgaggagggcgagaccacctcccacctgatgggcatgttctaccggaccatccggatgatggagaacggcatcaagcccgtgtacgtgttcgacggcaagcccccccagctgaagtccggcgagctggccaagcggtccgagcggcgggccgaggccgagaagcagctgcagcaggcccaggccgccggcgccgagcaggaggtggagaagttcaccaagcggctggtgaaggtgaccaagcagcacaacgacgagtgcaagcacctgctgtccctgatgggcatcccctacctggacgccccctccgaggccgaggcctcctgcgccgccctggtgaaggccggcaaggtgtacgccgccgccaccgaggacatggactgcctgaccttcggctcccccgtgctgatgcggcacctgaccgcctccgaggccaagaagctgcccatccaggagttccacctgtcccggatcctgcaggagctgggcctgaaccaggagcagttcgtggacctgtgcatcctgctgggctccgactactgcgagtccatccggggcatcggccccaagcgggccgtggacctgatccagaagcacaagtccatcgaggagatcgtgcggcggctggaccccaacaagtaccccgtgcccgagaactggctgcacaaggaggcccaccagctgttcctggagcccgaggtgctggaccccgagtccgtggagctgaagtggtccgagcccaacgaggaggagctgatcaagttcatgtgcggcgagaagcagttctccgaggagcggatccggtccggcgtgaagcggctgtccaagtcccggcagggctccacccagggccggctggacgacttcttcaaggtgaccggctccctgtcctccgccaagcggaaggagcccgagcccaagggctccaccaagaagaaggccaagaccggcgccgccggcaagttcaagcggggcaagtccggcggctccaagcggaccgccgacggctccgagttcgagcccaagaagaagcggaaggtgtccgagtccgccacccccgagtccgtgtccggctggcggctgttcaagaagatctcctagctagcaccagcctcaagaacacccgaatggagtctctaagctacataataccaacttacactttacaaaatgttgtcccccaaaatgtagccattcgtatctgctcctaataaaaagaaagtttcttcacattcttgtcagcccagaaccccacacgagttttgccactgctaagctgtgaggcagtgcaggctgggacagccgacctccaggttgcgaaaaacctggtctcgagaaaaaaaaaaaatggaaaaaaaaaaaacggaaaaaaaaaaaaggtaaaaaaaaaaaatataaaaaaaaaaaacataaaaaaaaaaaacgaaaaaaaaaaaacgtaaaaaaaaaaaactcaaaaaaaaaaaagataaaaaaaaaaaacctaaaaaaaaaaaatgtaaaaaaaaaaaagggaaaaaaaaaaaacgcaaaaaaaaaaaacacaaaaaaaaaaaatgcaaaaaaaaaaaatcgaaaaaaaaaaaatctaaaaaaaaaaaacgaaaaaaaaaaaacccaaaaaaaaaaaagacaaaaaaaaaaaatagaaaaaaaaaaagttaaaaaaaaaaaactgaaaaaaaaaaaatttaaaaaaaaaaaatctag

SEQ ID NO: 3507 - DNA, 1956 bp, synthetic construct
  misc_feature 1..1956: note = Synthetic
  source 1..1956: mol_type = other DNA
aggactcactatttgttttcgcgcccagttgcaaaaagtgtcgaagctcagaataaacgctcaactttggccggatctgccaccatgggcatccagggcctggccaagctgatcgccgacgtggccccctccgccatccgggagaacgacatcaagtcctacttcggccggaaggtggccatcgacgcctccatgtccatctaccagttcctgatcgccgtgcggcagggcggcgacgtgctgcagaacgaggagggcgagaccacctcccacctgatgggcatgttctaccggaccatccggatgatggagaacggcatcaagcccgtgtacgtgttcgacggcaagcccccccagctgaagtccggcgagctggccaagcggtccgagcggcgggccgaggccgagaagcagctgcagcaggcccaggccgccggcgccgagcaggaggtggagaagttcaccaagcggctggtgaaggtgaccaagcagcacaacgacgagtgcaagcacctgctgtccctgatgggcatcccctacctggacgccccctccgaggccgaggcctcctgcgccgccctggtgaaggccggcaaggtgtacgccgccgccaccgaggacatggactgcctgaccttcggctcccccgtgctgatgcggcacctgaccgcctccgaggccaagaagctgcccatccaggagttccacctgtcccggatcctgcaggagctgggcctgaaccaggagcagttcgtggacctgtgcatcctgctgggctccgactactgcgagtccatccggggcatcggccccaagcgggccgtggacctgatccagaagcacaagtccatcgaggagatcgtgcggcggctggaccccaacaagtaccccgtgcccgagaactggctgcacaaggaggcccaccagctgttcctggagcccgaggtgctggaccccgagtccgtggagctgaagtggtccgagcccaacgaggaggagctgatcaagttcatgtgcggcgagaagcagttctccgaggagcggatccggtccggcgtgaagcggctgtccaagtcccggcagggctccacccagggccggctggacgacttcttcaaggtgaccggctccctgtcctccgccaagcggaaggagcccgagcccaagggctccaccaagaagaaggccaagaccggcgccgccggcaagttcaagcggggcaagtccggcggctccaagcggaccgccgacggctccgagttcgagcccaagaagaagcggaaggtgtccgagtccgccacccccgagtccgtgtccggctggcggctgttcaagaagatctcctagctagcaccagcctcaagaacacccgaatggagtctctaagctacataataccaacttacactttacaaaatgttgtcccccaaaatgtagccattcgtatctgctcctaataaaaagaaagtttcttcacattcttgtcagcccagaaccccacacgagttttgccactgctaagctgtgaggcagtgcaggctgggacagccgacctccaggttgcgaaaaacctggtctcgagaaaaaaaaaaaatggaaaaaaaaaaaacggaaaaaaaaaaaaggtaaaaaaaaaaaatataaaaaaaaaaaacataaaaaaaaaaaacgaaaaaaaaaaaacgtaaaaaaaaaaaactcaaaaaaaaaaaagataaaaaaaaaaaacctaaaaaaaaaaaatgtaaaaaaaaaaaagggaaaaaaaaaaaacgcaaaaaaaaaaaacacaaaaaaaaaaaatgcaaaaaaaaaaaatcgaaaaaaaaaaaatctaaaaaaaaaaaacgaaaaaaaaaaaacccaaaaaaaaaaaagacaaaaaaaaaaaatagaaaaaaaaaaagttaaaaaaaaaaaactgaaaaaaaaaaaatttaaaaaaaaaaaatctag

SEQ ID NO: 3508 - DNA, 2313 bp, synthetic construct
  misc_feature 1..2313: note = Synthetic
  source 1..2313: mol_type = other DNA
aggactcactatttgttttcgcgcccagttgcaaaaagtgtcgaagctcagaataaacgctcaactttggccggatctgccaccatggactacaaggacgacgacgacaaggactacaaggacgacgacgacaaggactacaaggacgacgacgacaaggccgccgccatgaccgacccccgggagaccgtgccccccggcaactccggcgaggagaccatcggcgaggccttcgcctggctgaaccggaccgtggaggccatcaaccgggaggccgtgaaccacctgccccgggagctgatcttccaggtgtggcagcggtcctggcggtactggcacgacgagcagggcatgtccgagtcctacaccaagtaccggtacctgtgcatcatccagaaggccgtgtacatgcacgtgcggaagggctgcacctgcctgggccggggccacggccccggcggctggcggcccggccccccccctccccccccacccggcctggtgggcagcggcgccaccaatttcagcctgctgaaacaggccggcgacgtggaagagaatcctggacctatgggcatccagggcctggccaagctgatcgccgacgtggccccctccgccatccgggagaacgacatcaagtcctacttcggccggaaggtggccatcgacgcctccatgtccatctaccagttcctgatcgccgtgcggcagggcggcgacgtgctgcagaacgaggagggcgagaccacctcccacctgatgggcatgttctaccggaccatccggatgatggagaacggcatcaagcccgtgtacgtgttcgacggcaagcccccccagctgaagtccggcgagctggccaagcggtccgagcggcgggccgaggccgagaagcagctgcagcaggcccaggccgccggcgccgagcaggaggtggagaagttcaccaagcggctggtgaaggtgaccaagcagcacaacgacgagtgcaagcacctgctgtccctgatgggcatcccctacctggacgccccctccgaggccgaggcctcctgcgccgccctggtgaaggccggcaaggtgtacgccgccgccaccgaggacatggactgcctgaccttcggctcccccgtgctgatgcggcacctgaccgcctccgaggccaagaagctgcccatccaggagttccacctgtcccggatcctgcaggagctgggcctgaaccaggagcagttcgtggacctgtgcatcctgctgggctccgactactgcgagtccatccggggcatcggccccaagcgggccgtggacctgatccagaagcacaagtccatcgaggagatcgtgcggcggctggaccccaacaagtaccccgtgcccgagaactggctgcacaaggaggcccaccagctgttcctggagcccgaggtgctggaccccgagtccgtggagctgaagtggtccgagcccaacgaggaggagctgatcaagttcatgtgcggcgagaagcagttctccgaggagcggatccggtccggcgtgaagcggctgtccaagtcccggcagggctccacccagggccggctggacgacttcttcaaggtgaccggctccctgtcctccgccaagcggaaggagcccgagcccaagggctccaccaagaagaaggccaagaccggcgccgccggcaagttcaagcggggcaagaagatcgccgccctgaaggagaagatcgccgccctgaaggagaagaacgccgccctgaagtggaagatcgccgccctgaaggagtagctagcaccagcctcaagaacacccgaatggagtctctaagctacataataccaacttacactttacaaaatgttgtcccccaaaatgtagccattcgtatctgctcctaataaaaagaaagtttcttcacattctctcgagaaaaaaaaaaaatggaaaaaaaaaaaacggaaaaaaaaaaaaggtaaaaaaaaaaaatataaaaaaaaaaaacataaaaaaaaaaaacgaaaaaaaaaaaacgtaaaaaaaaaaaactcaaaaaaaaaaaagataaaaaaaaaaaacctaaaaaaaaaaaatgtaaaaaaaaaaaagggaaaaaaaaaaaacgcaaaaaaaaaaaacacaaaaaaaaaaaatgcaaaaaaaaaaaatcgaaaaaaaaaaaatctaaaaaaaaaaaacgaaaaaaaaaaaacccaaaaaaaaaaaagacaaaaaaaaaaaatagaaaaaaaaaaaagttaaaaaaaaaaaactgaaaaaaaaaaaatttaaaaaaaaaaaatctag

SEQ ID NO: 3509 - DNA, 2241 bp, synthetic construct
  misc_feature 1..2241: note = Synthetic
  source 1..2241: mol_type = other DNA
aggactcactatttgttttcgcgcccagttgcaaaaagtgtcgaagctcagaataaacgctcaactttggccggatctgccaccatggccgccgccatgaccgacccccgggagaccgtgccccccggcaactccggcgaggagaccatcggcgaggccttcgcctggctgaaccggaccgtggaggccatcaaccgggaggccgtgaaccacctgccccgggagctgatcttccaggtgtggcagcggtcctggcggtactggcacgacgagcagggcatgtccgagtcctacaccaagtaccggtacctgtgcatcatccagaaggccgtgtacatgcacgtgcggaagggctgcacctgcctgggccggggccacggccccggcggctggcggcccggccccccccctccccccccacccggcctggtgggcagcggcgccaccaatttcagcctgctgaaacaggccggcgacgtggaagagaatcctggacctatgggcatccagggcctggccaagctgatcgccgacgtggccccctccgccatccgggagaacgacatcaagtcctacttcggccggaaggtggccatcgacgcctccatgtccatctaccagttcctgatcgccgtgcggcagggcggcgacgtgctgcagaacgaggagggcgagaccacctcccacctgatgggcatgttctaccggaccatccggatgatggagaacggcatcaagcccgtgtacgtgttcgacggcaagcccccccagctgaagtccggcgagctggccaagcggtccgagcggcgggccgaggccgagaagcagctgcagcaggcccaggccgccggcgccgagcaggaggtggagaagttcaccaagcggctggtgaaggtgaccaagcagcacaacgacgagtgcaagcacctgctgtccctgatgggcatcccctacctggacgccccctccgaggccgaggcctcctgcgccgccctggtgaaggccggcaaggtgtacgccgccgccaccgaggacatggactgcctgaccttcggctcccccgtgctgatgcggcacctgaccgcctccgaggccaagaagctgcccatccaggagttccacctgtcccggatcctgcaggagctgggcctgaaccaggagcagttcgtggacctgtgcatcctgctgggctccgactactgcgagtccatccggggcatcggccccaagcgggccgtggacctgatccagaagcacaagtccatcgaggagatcgtgcggcggctggaccccaacaagtaccccgtgcccgagaactggctgcacaaggaggcccaccagctgttcctggagcccgaggtgctggaccccgagtccgtggagctgaagtggtccgagcccaacgaggaggagctgatcaagttcatgtgcggcgagaagcagttctccgaggagcggatccggtccggcgtgaagcggctgtccaagtcccggcagggctccacccagggccggctggacgacttcttcaaggtgaccggctccctgtcctccgccaagcggaaggagcccgagcccaagggctccaccaagaagaaggccaagaccggcgccgccggcaagttcaagcggggcaagaagatcgccgccctgaaggagaagatcgccgccctgaaggagaagaacgccgccctgaagtggaagatcgccgccctgaaggagtagctagcaccagcctcaagaacacccgaatggagtctctaagctacataataccaacttacactttacaaaatgttgtcccccaaaatgtagccattcgtatctgctcctaataaaaagaaagtttcttcacattctctcgagaaaaaaaaaaaatggaaaaaaaaaaaacggaaaaaaaaaaaaggtaaaaaaaaaaaatataaaaaaaaaaaacataaaaaaaaaaaacgaaaaaaaaaaaacgtaaaaaaaaaaaactcaaaaaaaaaaaagataaaaaaaaaaaacctaaaaaaaaaaaatgtaaaaaaaaaaaagggaaaaaaaaaaaacgcaaaaaaaaaaaacacaaaaaaaaaaaatgcaaaaaaaaaaaatcgaaaaaaaaaaaatctaaaaaaaaaaaacgaaaaaaaaaaaacccaaaaaaaaaaaagacaaaaaaaaaaaatagaaaaaaaaaaaagttaaaaaaaaaaaactgaaaaaaaaaaaatttaaaaaaaaaaaatctag

SEQ ID NO: 3510 - DNA, 1827 bp, synthetic construct
  misc_feature 1..1827: note = Synthetic
  source 1..1827: mol_type = other DNA
aggactcactatttgttttcgcgcccagttgcaaaaagtgtcgaagctcagaataaacgctcaactttggccggatctgccaccatgggcatccagggcctggccaagctgatcgccgacgtggccccctccgccatccgggagaacgacatcaagtcctacttcggccggaaggtggccatcgacgcctccatgtccatctaccagttcctgatcgccgtgcggcagggcggcgacgtgctgcagaacgaggagggcgagaccacctcccacctgatgggcatgttctaccggaccatccggatgatggagaacggcatcaagcccgtgtacgtgttcgacggcaagcccccccagctgaagtccggcgagctggccaagcggtccgagcggcgggccgaggccgagaagcagctgcagcaggcccaggccgccggcgccgagcaggaggtggagaagttcaccaagcggctggtgaaggtgaccaagcagcacaacgacgagtgcaagcacctgctgtccctgatgggcatcccctacctggacgccccctccgaggccgaggcctcctgcgccgccctggtgaaggccggcaaggtgtacgccgccgccaccgaggacatggactgcctgaccttcggctcccccgtgctgatgcggcacctgaccgcctccgaggccaagaagctgcccatccaggagttccacctgtcccggatcctgcaggagctgggcctgaaccaggagcagttcgtggacctgtgcatcctgctgggctccgactactgcgagtccatccggggcatcggccccaagcgggccgtggacctgatccagaagcacaagtccatcgaggagatcgtgcggcggctggaccccaacaagtaccccgtgcccgagaactggctgcacaaggaggcccaccagctgttcctggagcccgaggtgctggaccccgagtccgtggagctgaagtggtccgagcccaacgaggaggagctgatcaagttcatgtgcggcgagaagcagttctccgaggagcggatccggtccggcgtgaagcggctgtccaagtcccggcagggctccacccagggccggctggacgacttcttcaaggtgaccggctccctgtcctccgccaagcggaaggagcccgagcccaagggctccaccaagaagaaggccaagaccggcgccgccggcaagttcaagcggggcaagaagatcgccgccctgaaggagaagatcgccgccctgaaggagaagaacgccgccctgaagtggaagatcgccgccctgaaggagtagctagcaccagcctcaagaacacccgaatggagtctctaagctacataataccaacttacactttacaaaatgttgtcccccaaaatgtagccattcgtatctgctcctaataaaaagaaagtttcttcacattctctcgagaaaaaaaaaaaatggaaaaaaaaaaaacggaaaaaaaaaaaaggtaaaaaaaaaaaatataaaaaaaaaaaacataaaaaaaaaaaacgaaaaaaaaaaaacgtaaaaaaaaaaaactcaaaaaaaaaaaagataaaaaaaaaaaacctaaaaaaaaaaaatgtaaaaaaaaaaaagggaaaaaaaaaaaacgcaaaaaaaaaaaacacaaaaaaaaaaaatgcaaaaaaaaaaaatcgaaaaaaaaaaaatctaaaaaaaaaaaacgaaaaaaaaaaaacccaaaaaaaaaaaagacaaaaaaaaaaaatagaaaaaaaaaaaagttaaaaaaaaaaaactgaaaaaaaaaaaatttaaaaaaaaaaaatctag

SEQ ID NO: 3511 - DNA, 2295 bp, synthetic construct
  misc_feature 1..2295: note = Synthetic
  source 1..2295: mol_type = other DNA
aggactcactatttgttttcgcgcccagttgcaaaaagtgtcgaagctcagaataaacgctcaactttggccggatctgccaccatggactacaaggacgacgacgacaaggactacaaggacgacgacgacaaggactacaaggacgacgacgacaaggccgccgccatgaccgacccccgggagaccgtgccccccggcaactccggcgaggagaccatcggcgaggccttcgcctggctgaaccggaccgtggaggccatcaaccgggaggccgtgaaccacctgccccgggagctgatcttccaggtgtggcagcggtcctggcggtactggcacgacgagcagggcatgtccgagtcctacaccaagtaccggtacctgtgcatcatccagaaggccgtgtacatgcacgtgcggaagggctgcacctgcctgggccggggccacggccccggcggctggcggcccggccccccccctccccccccacccggcctggtgtccggctccgagacccccggcacctccgagtccgccacccccgagtccatgggcatccagggcctggccaagctgatcgccgacgtggccccctccgccatccgggagaacgacatcaagtcctacttcggccggaaggtggccatcgacgcctccatgtccatctaccagttcctgatcgccgtgcggcagggcggcgacgtgctgcagaacgaggagggcgagaccacctcccacctgatgggcatgttctaccggaccatccggatgatggagaacggcatcaagcccgtgtacgtgttcgacggcaagcccccccagctgaagtccggcgagctggccaagcggtccgagcggcgggccgaggccgagaagcagctgcagcaggcccaggccgccggcgccgagcaggaggtggagaagttcaccaagcggctggtgaaggtgaccaagcagcacaacgacgagtgcaagcacctgctgtccctgatgggcatcccctacctggacgccccctccgaggccgaggcctcctgcgccgccctggtgaaggccggcaaggtgtacgccgccgccaccgaggacatggactgcctgaccttcggctcccccgtgctgatgcggcacctgaccgcctccgaggccaagaagctgcccatccaggagttccacctgtcccggatcctgcaggagctgggcctgaaccaggagcagttcgtggacctgtgcatcctgctgggctccgactactgcgagtccatccggggcatcggccccaagcgggccgtggacctgatccagaagcacaagtccatcgaggagatcgtgcggcggctggaccccaacaagtaccccgtgcccgagaactggctgcacaaggaggcccaccagctgttcctggagcccgaggtgctggaccccgagtccgtggagctgaagtggtccgagcccaacgaggaggagctgatcaagttcatgtgcggcgagaagcagttctccgaggagcggatccggtccggcgtgaagcggctgtccaagtcccggcagggctccacccagggccggctggacgacttcttcaaggtgaccggctccctgtcctccgccaagcggaaggagcccgagcccaagggctccaccaagaagaaggccaagaccggcgccgccggcaagttcaagcggggcaagaagatcgccgccctgaaggagaagatcgccgccctgaaggagaagaacgccgccctgaagtggaagatcgccgccctgaaggagtagctagcaccagcctcaagaacacccgaatggagtctctaagctacataataccaacttacactttacaaaatgttgtcccccaaaatgtagccattcgtatctgctcctaataaaaagaaagtttcttcacattctctcgagaaaaaaaaaaaatggaaaaaaaaaaaacggaaaaaaaaaaaaggtaaaaaaaaaaaatataaaaaaaaaaaacataaaaaaaaaaaacgaaaaaaaaaaaacgtaaaaaaaaaaaactcaaaaaaaaaaaagataaaaaaaaaaaacctaaaaaaaaaaaatgtaaaaaaaaaaaagggaaaaaaaaaaaacgcaaaaaaaaaaaacacaaaaaaaaaaaatgcaaaaaaaaaaaatcgaaaaaaaaaaaatctaaaaaaaaaaaacgaaaaaaaaaaaacccaaaaaaaaaaaagacaaaaaaaaaaaatagaaaaaaaaaaaagttaaaaaaaaaaaactgaaaaaaaaaaaatttaaaaaaaaaaaatctag

SEQ ID NO: 3512 - DNA, 2223 bp, synthetic construct
  misc_feature 1..2223: note = Synthetic
  source 1..2223: mol_type = other DNA
aggactcactatttgttttcgcgcccagttgcaaaaagtgtcgaagctcagaataaacgctcaactttggccggatctgccaccatggccgccgccatgaccgacccccgggagaccgtgccccccggcaactccggcgaggagaccatcggcgaggccttcgcctggctgaaccggaccgtggaggccatcaaccgggaggccgtgaaccacctgccccgggagctgatcttccaggtgtggcagcggtcctggcggtactggcacgacgagcagggcatgtccgagtcctacaccaagtaccggtacctgtgcatcatccagaaggccgtgtacatgcacgtgcggaagggctgcacctgcctgggccggggccacggccccggcggctggcggcccggccccccccctccccccccacccggcctggtgtccggctccgagacccccggcacctccgagtccgccacccccgagtccatgggcatccagggcctggccaagctgatcgccgacgtggccccctccgccatccgggagaacgacatcaagtcctacttcggccggaaggtggccatcgacgcctccatgtccatctaccagttcctgatcgccgtgcggcagggcggcgacgtgctgcagaacgaggagggcgagaccacctcccacctgatgggcatgttctaccggaccatccggatgatggagaacggcatcaagcccgtgtacgtgttcgacggcaagcccccccagctgaagtccggcgagctggccaagcggtccgagcggcgggccgaggccgagaagcagctgcagcaggcccaggccgccggcgccgagcaggaggtggagaagttcaccaagcggctggtgaaggtgaccaagcagcacaacgacgagtgcaagcacctgctgtccctgatgggcatcccctacctggacgccccctccgaggccgaggcctcctgcgccgccctggtgaaggccggcaaggtgtacgccgccgccaccgaggacatggactgcctgaccttcggctcccccgtgctgatgcggcacctgaccgcctccgaggccaagaagctgcccatccaggagttccacctgtcccggatcctgcaggagctgggcctgaaccaggagcagttcgtggacctgtgcatcctgctgggctccgactactgcgagtccatccggggcatcggccccaagcgggccgtggacctgatccagaagcacaagtccatcgaggagatcgtgcggcggctggaccccaacaagtaccccgtgcccgagaactggctgcacaaggaggcccaccagctgttcctggagcccgaggtgctggaccccgagtccgtggagctgaagtggtccgagcccaacgaggaggagctgatcaagttcatgtgcggcgagaagcagttctccgaggagcggatccggtccggcgtgaagcggctgtccaagtcccggcagggctccacccagggccggctggacgacttcttcaaggtgaccggctccctgtcctccgccaagcggaaggagcccgagcccaagggctccaccaagaagaaggccaagaccggcgccgccggcaagttcaagcggggcaagaagatcgccgccctgaaggagaagatcgccgccctgaaggagaagaacgccgccctgaagtggaagatcgccgccctgaaggagtagctagcaccagcctcaagaacacccgaatggagtctctaagctacataataccaacttacactttacaaaatgttgtcccccaaaatgtagccattcgtatctgctcctaataaaaagaaagtttcttcacattctctcgagaaaaaaaaaaaatggaaaaaaaaaaaacggaaaaaaaaaaaaggtaaaaaaaaaaaatataaaaaaaaaaaacataaaaaaaaaaaacgaaaaaaaaaaaacgtaaaaaaaaaaaactcaaaaaaaaaaaagataaaaaaaaaaaacctaaaaaaaaaaaatgtaaaaaaaaaaaagggaaaaaaaaaaaacgcaaaaaaaaaaaacacaaaaaaaaaaaatgcaaaaaaaaaaaatcgaaaaaaaaaaaatctaaaaaaaaaaaacgaaaaaaaaaaaacccaaaaaaaaaaaagacaaaaaaaaaaaatagaaaaaaaaaaaagttaaaaaaaaaaaactgaaaaaaaaaaaatttaaaaaaaaaaaatctag

SEQ ID NO: 3513 - DNA, 2313 bp, synthetic construct
  misc_feature 1..2313: note = Synthetic
  source 1..2313: mol_type = other DNA
aggactcactatttgttttcgcgcccagttgcaaaaagtgtcgaagctcagaataaacgctcaactttggccggatctgccaccatgggcatccagggcctggccaagctgatcgccgacgtggccccctccgccatccgggagaacgacatcaagtcctacttcggccggaaggtggccatcgacgcctccatgtccatctaccagttcctgatcgccgtgcggcagggcggcgacgtgctgcagaacgaggagggcgagaccacctcccacctgatgggcatgttctaccggaccatccggatgatggagaacggcatcaagcccgtgtacgtgttcgacggcaagcccccccagctgaagtccggcgagctggccaagcggtccgagcggcgggccgaggccgagaagcagctgcagcaggcccaggccgccggcgccgagcaggaggtggagaagttcaccaagcggctggtgaaggtgaccaagcagcacaacgacgagtgcaagcacctgctgtccctgatgggcatcccctacctggacgccccctccgaggccgaggcctcctgcgccgccctggtgaaggccggcaaggtgtacgccgccgccaccgaggacatggactgcctgaccttcggctcccccgtgctgatgcggcacctgaccgcctccgaggccaagaagctgcccatccaggagttccacctgtcccggatcctgcaggagctgggcctgaaccaggagcagttcgtggacctgtgcatcctgctgggctccgactactgcgagtccatccggggcatcggccccaagcgggccgtggacctgatccagaagcacaagtccatcgaggagatcgtgcggcggctggaccccaacaagtaccccgtgcccgagaactggctgcacaaggaggcccaccagctgttcctggagcccgaggtgctggaccccgagtccgtggagctgaagtggtccgagcccaacgaggaggagctgatcaagttcatgtgcggcgagaagcagttctccgaggagcggatccggtccggcgtgaagcggctgtccaagtcccggcagggctccacccagggccggctggacgacttcttcaaggtgaccggctccctgtcctccgccaagcggaaggagcccgagcccaagggctccaccaagaagaaggccaagaccggcgccgccggcaagttcaagcggggcaagaagatcgccgccctgaaggagaagatcgccgccctgaaggagaagaacgccgccctgaagtggaagatcgccgccctgaaggagggcagcggcgccaccaatttcagcctgctgaaacaggccggcgacgtggaagagaatcctggacctgactacaaggacgacgacgacaaggactacaaggacgacgacgacaaggactacaaggacgacgacgacaaggccgccgccatgaccgacccccgggagaccgtgccccccggcaactccggcgaggagaccatcggcgaggccttcgcctggctgaaccggaccgtggaggccatcaaccgggaggccgtgaaccacctgccccgggagctgatcttccaggtgtggcagcggtcctggcggtactggcacgacgagcagggcatgtccgagtcctacaccaagtaccggtacctgtgcatcatccagaaggccgtgtacatgcacgtgcggaagggctgcacctgcctgggccggggccacggccccggcggctggcggcccggccccccccctccccccccacccggcctggtgtagtagctagcaccagcctcaagaacacccgaatggagtctctaagctacataataccaacttacactttacaaaatgttgtcccccaaaatgtagccattcgtatctgctcctaataaaaagaaagtttcttcacattctctcgagaaaaaaaaaaaatggaaaaaaaaaaaacggaaaaaaaaaaaaggtaaaaaaaaaaaatataaaaaaaaaaaacataaaaaaaaaaaacgaaaaaaaaaaaacgtaaaaaaaaaaaactcaaaaaaaaaaaagataaaaaaaaaaaacctaaaaaaaaaaaatgtaaaaaaaaaaaagggaaaaaaaaaaaacgcaaaaaaaaaaaacacaaaaaaaaaaaatgcaaaaaaaaaaaatcgaaaaaaaaaaaatctaaaaaaaaaaaacgaaaaaaaaaaaacccaaaaaaaaaaaagacaaaaaaaaaaaatagaaaaaaaaaaaagttaaaaaaaaaaaactgaaaaaaaaaaaatttaaaaaaaaaaaatctag

SEQ ID NO: 3514 - DNA, 2241 bp, synthetic construct
  misc_feature 1..2241: note = Synthetic
  source 1..2241: mol_type = other DNA
aggactcactatttgttttcgcgcccagttgcaaaaagtgtcgaagctcagaataaacgctcaactttggccggatctgccaccatgggcatccagggcctggccaagctgatcgccgacgtggccccctccgccatccgggagaacgacatcaagtcctacttcggccggaaggtggccatcgacgcctccatgtccatctaccagttcctgatcgccgtgcggcagggcggcgacgtgctgcagaacgaggagggcgagaccacctcccacctgatgggcatgttctaccggaccatccggatgatggagaacggcatcaagcccgtgtacgtgttcgacggcaagcccccccagctgaagtccggcgagctggccaagcggtccgagcggcgggccgaggccgagaagcagctgcagcaggcccaggccgccggcgccgagcaggaggtggagaagttcaccaagcggctggtgaaggtgaccaagcagcacaacgacgagtgcaagcacctgctgtccctgatgggcatcccctacctggacgccccctccgaggccgaggcctcctgcgccgccctggtgaaggccggcaaggtgtacgccgccgccaccgaggacatggactgcctgaccttcggctcccccgtgctgatgcggcacctgaccgcctccgaggccaagaagctgcccatccaggagttccacctgtcccggatcctgcaggagctgggcctgaaccaggagcagttcgtggacctgtgcatcctgctgggctccgactactgcgagtccatccggggcatcggccccaagcgggccgtggacctgatccagaagcacaagtccatcgaggagatcgtgcggcggctggaccccaacaagtaccccgtgcccgagaactggctgcacaaggaggcccaccagctgttcctggagcccgaggtgctggaccccgagtccgtggagctgaagtggtccgagcccaacgaggaggagctgatcaagttcatgtgcggcgagaagcagttctccgaggagcggatccggtccggcgtgaagcggctgtccaagtcccggcagggctccacccagggccggctggacgacttcttcaaggtgaccggctccctgtcctccgccaagcggaaggagcccgagcccaagggctccaccaagaagaaggccaagaccggcgccgccggcaagttcaagcggggcaagaagatcgccgccctgaaggagaagatcgccgccctgaaggagaagaacgccgccctgaagtggaagatcgccgccctgaaggagggcagcggcgccaccaatttcagcctgctgaaacaggccggcgacgtggaagagaatcctggacctgccgccgccatgaccgacccccgggagaccgtgccccccggcaactccggcgaggagaccatcggcgaggccttcgcctggctgaaccggaccgtggaggccatcaaccgggaggccgtgaaccacctgccccgggagctgatcttccaggtgtggcagcggtcctggcggtactggcacgacgagcagggcatgtccgagtcctacaccaagtaccggtacctgtgcatcatccagaaggccgtgtacatgcacgtgcggaagggctgcacctgcctgggccggggccacggccccggcggctggcggcccggccccccccctccccccccacccggcctggtgtagtagctagcaccagcctcaagaacacccgaatggagtctctaagctacataataccaacttacactttacaaaatgttgtcccccaaaatgtagccattcgtatctgctcctaataaaaagaaagtttcttcacattctctcgagaaaaaaaaaaaatggaaaaaaaaaaaacggaaaaaaaaaaaaggtaaaaaaaaaaaatataaaaaaaaaaaacataaaaaaaaaaaacgaaaaaaaaaaaacgtaaaaaaaaaaaactcaaaaaaaaaaaagataaaaaaaaaaaacctaaaaaaaaaaaatgtaaaaaaaaaaaagggaaaaaaaaaaaacgcaaaaaaaaaaaacacaaaaaaaaaaaatgcaaaaaaaaaaaatcgaaaaaaaaaaaatctaaaaaaaaaaaacgaaaaaaaaaaaacccaaaaaaaaaaaagacaaaaaaaaaaaatagaaaaaaaaaaaagttaaaaaaaaaaaactgaaaaaaaaaaaatttaaaaaaaaaaaatctag

SEQ ID NO: 3515 - DNA, 951 bp, synthetic construct
  misc_feature 1..951: note = Synthetic
  source 1..951: mol_type = other DNA
aggactcactatttgttttcgcgcccagttgcaaaaagtgtcgaagctcagaataaacgctcaactttggccggatctgccaccatggccgccgccatgaccgacccccgggagaccgtgccccccggcaactccggcgaggagaccatcggcgaggccttcgcctggctgaaccggaccgtggaggccatcaaccgggaggccgtgaaccacctgccccgggagctgatcttccaggtgtggcagcggtcctggcggtactggcacgacgagcagggcatgtccgagtcctacaccaagtaccggtacctgtgcatcatccagaaggccgtgtacatgcacgtgcggaagggctgcacctgcctgggccggggccacggccccggcggctggcggcccggccccccccctccccccccacccggcctggtgtagctagcaccagcctcaagaacacccgaatggagtctctaagctacataataccaacttacactttacaaaatgttgtcccccaaaatgtagccattcgtatctgctcctaataaaaagaaagtttcttcacattctctcgagaaaaaaaaaaaatggaaaaaaaaaaaacggaaaaaaaaaaaaggtaaaaaaaaaaaatataaaaaaaaaaaacataaaaaaaaaaaacgaaaaaaaaaaaacgtaaaaaaaaaaaactcaaaaaaaaaaaagataaaaaaaaaaaacctaaaaaaaaaaaatgtaaaaaaaaaaaagggaaaaaaaaaaaacgcaaaaaaaaaaaacacaaaaaaaaaaaatgcaaaaaaaaaaaatcgaaaaaaaaaaaatctaaaaaaaaaaaacgaaaaaaaaaaaacccaaaaaaaaaaaagacaaaaaaaaaaaatagaaaaaaaaaaaagttaaaaaaaaaaaactgaaaaaaaaaaaatttaaaaaaaaaaaatctag

SEQ ID NO: 3516 - DNA, 1766 bp, synthetic construct
  misc_feature 1..1766: note = Synthetic
  source 1..1766: mol_type = other DNA
gggaagctcagaataaacgctcaactttggccggatctgccaccatgggcatccagggcctggccaagctgatcgccgacgtggccccctccgccatccgggagaacgacatcaagtcctacttcggccggaaggtggccatcgacgcctccatgtccatctaccagttcctgatcgccgtgcggcagggcggcgacgtgctgcagaacgaggagggcgagaccacctcccacctgatgggcatgttctaccggaccatccggatgatggagaacggcatcaagcccgtgtacgtgttcgacggcaagcccccccagctgaagtccggcgagctggccaagcggtccgagcggcgggccgaggccgagaagcagctgcagcaggcccaggccgccggcgccgagcaggaggtggagaagttcaccaagcggctggtgaaggtgaccaagcagcacaacgacgagtgcaagcacctgctgtccctgatgggcatcccctacctggacgccccctccgaggccgaggcctcctgcgccgccctggtgaaggccggcaaggtgtacgccgccgccaccgaggacatggactgcctgaccttcggctcccccgtgctgatgcggcacctgaccgcctccgaggccaagaagctgcccatccaggagttccacctgtcccggatcctgcaggagctgggcctgaaccaggagcagttcgtggacctgtgcatcctgctgggctccgactactgcgagtccatccggggcatcggccccaagcgggccgtggacctgatccagaagcacaagtccatcgaggagatcgtgcggcggctggaccccaacaagtaccccgtgcccgagaactggctgcacaaggaggcccaccagctgttcctggagcccgaggtgctggaccccgagtccgtggagctgaagtggtccgagcccaacgaggaggagctgatcaagttcatgtgcggcgagaagcagttctccgaggagcggatccggtccggcgtgaagcggctgtccaagtcccggcagggctccacccagggccggctggacgacttcttcaaggtgaccggctccctgtcctccgccaagcggaaggagcccgagcccaagggctccaccaagaagaaggccaagaccggcgccgccggcaagttcaagcggggcaagtccggcggctccaagcggaccgccgacggctccgagttcgagcccaagaagaagcggaaggtgtagctagcaccagcctcaagaacacccgaatggagtctctaagctacataataccaacttacactttacaaaatgttgtcccccaaaatgtagccattcgtatctgctcctaataaaaagaaagtttcttcacattctctcgagaaaaaaaaaaaatggaaaaaaaaaaaacggaaaaaaaaaaaaggtaaaaaaaaaaaatataaaaaaaaaaaacataaaaaaaaaaaacgaaaaaaaaaaaacgtaaaaaaaaaaaactcaaaaaaaaaaaagataaaaaaaaaaaacctaaaaaaaaaaaatgtaaaaaaaaaaaagggaaaaaaaaaaaacgcaaaaaaaaaaaacacaaaaaaaaaaaatgcaaaaaaaaaaaatcgaaaaaaaaaaaatctaaaaaaaaaaaacgaaaaaaaaaaaacccaaaaaaaaaaaagacaaaaaaaaaaaatagaaaaaaaaaaaagttaaaaaaaaaaaactgaaaaaaaaaaaatttaaaaaaaaaaaatctag

SEQ ID NO: 3517 - DNA, 1743 bp, synthetic construct; identical to SEQ ID NO: 3502
  misc_feature 1..1743: note = Synthetic
  source 1..1743: mol_type = other DNA

SEQ ID NO: 3518 - DNA, 1765 bp, synthetic construct
  misc_feature 1..1765: note = Synthetic
  source 1..1765: mol_type = other DNA
aggaagctcagaataaacgctcaactttggccggatctgccaccatgggcatccagggcctggccaagctgatcgccgacgtggccccctccgccatccgggagaacgacatcaagtcctacttcggccggaaggtggccatcgacgcctccatgtccatctaccagttcctgatcgccgtgcggcagggcggcgacgtgctgcagaacgaggagggcgagaccacctcccacctgatgggcatgttctaccggaccatccggatgatggagaacggcatcaagcccgtgtacgtgttcgacggcaagcccccccagctgaagtccggcgagctggccaagcggtccgagcggcgggccgaggccgagaagcagctgcagcaggcccaggccgccggcgccgagcaggaggtggagaagttcaccaagcggctggtgaaggtgaccaagcagcacaacgacgagtgcaagcacctgctgtccctgatgggcatcccctacctggacgccccctccgaggccgaggcctcctgcgccgccctggtgaaggccggcaaggtgtacgccgccgccaccgaggacatggactgcctgaccttcggctcccccgtgctgatgcggcacctgaccgcctccgaggccaagaagctgcccatccaggagttccacctgtcccggatcctgcaggagctgggcctgaaccaggagcagttcgtggacctgtgcatcctgctgggctccgactactgcgagtccatccggggcatcggccccaagcgggccgtggacctgatccagaagcacaagtccatcgaggagatcgtgcggcggctggaccccaacaagtaccccgtgcccgagaactggctgcacaaggaggcccaccagctgttcctggagcccgaggtgctggaccccgagtccgtggagctgaagtggtccgagcccaacgaggaggagctgatcaagttcatgtgcggcgagaagcagttctccgaggagcggatccggtccggcgtgaagcggctgtccaagtcccggcagggctccacccagggccggctggacgacttcttcaaggtgaccggctccctgtcctccgccaagcggaaggagcccgagcccaagggctccaccaagaagaaggccaagaccggcgccgccggcaagttcaagcggggcaagtccggcggctccaagcggaccgccgacggctccgagttcgagcccaagaagaagcggaaggtgtagctagcaccagcctcaagaacacccgaatggagtctctaagctacataataccaacttacactttacaaaatgttgtcccccaaaatgtagccattcgtatctgctcctaataaaaagaaagtttcttcacattctctcgagaaaaaaaaaaaatggaaaaaaaaaaaacggaaaaaaaaaaaaggtaaaaaaaaaaaatataaaaaaaaaaaacataaaaaaaaaaaacgaaaaaaaaaaaacgtaaaaaaaaaaaactcaaaaaaaaaaaagataaaaaaaaaaaacctaaaaaaaaaaaatgtaaaaaaaaaaaagggaaaaaaaaaaaacgcaaaaaaaaaaaacacaaaaaaaaaaaatgcaaaaaaaaaaaatcgaaaaaaaaaaaatctaaaaaaaaaaaacgaaaaaaaaaaaacccaaaaaaaaaaaagacaaaaaaaaaaaatagaaaaaaaaaaagttaaaaaaaaaaaactgaaaaaaaaaaaatttaaaaaaaaaaaatctag

SEQ ID NO: 3519 - DNA, 1496 bp, synthetic construct
  misc_feature 1..1496: note = Synthetic
  source 1..1496: mol_type = other DNA
aggaagctcagaataaacgctcaactttggccggatctgccaccatgggcatccagggcctggccaagctgatcgccgacgtggccccctccgccatccgggagaacgacatcaagtcctacttcggccggaaggtggccatcgacgcctccatgtccatctaccagttcctgatcgccgtgcggcagggcggcgacgtgctgcagaacgaggagggcgagaccacctcccacctgatgggcatgttctaccggaccatccggatgatggagaacggcatcaagcccgtgtacgtgttcgacggcaagcccccccagctgaagtccggcgagctggccaagcggtccgagcggcgggccgaggccgagaagcagctgcagcaggcccaggccgccggcgccgagcaggaggtggagaagttcaccaagcggctggtgaaggtgaccaagcagcacaacgacgagtgcaagcacctgctgtccctgatgggcatcccctacctggacgccccctccgaggccgaggcctcctgcgccgccctggtgaaggccggcaaggtgtacgccgccgccaccgaggacatggactgcctgaccttcggctcccccgtgctgatgcggcacctgaccgcctccgaggccaagaagctgcccatccaggagttccacctgtcccggatcctgcaggagctgggcctgaaccaggagcagttcgtggacctgtgcatcctgctgggctccgactactgcgagtccatccggggcatcggccccaagcgggccgtggacctgatccagaagcacaagtccatcgaggagatcgtgcggcggctggaccccaacaagtaccccgtgcccgagaactggctgcacaaggaggcccaccagctgttcctggagcccgaggtgctggaccccgagtccgtggagctgaagtggtccgagcccaacgaggaggagctgatcaagttcatgtgcggcgagaagcagttctccgaggagcggatccggtccggcgtgaagcggctgtccaagtcccggcagggctccacccagggccggctggacgacttcttcaaggtgaccggctccctgtcctccgccaagcggaaggagcccgagcccaagggctccaccaagaagaaggccaagaccggcgccgccggcaagttcaagcggggcaagtccggcggctccaagcggaccgccgacggctccgagttcgagcccaagaagaagcggaaggtgtagctagcaccagcctcaagaacacccgaatggagtctctaagctacataataccaacttacactttacaaaatgttgtcccccaaaatgtagccattcgtatctgctcctaataaaaagaaagtttcttcacattctctcgagaaaaaaaaaaaaaaaaaaaaaaaaaaaaaaaaaaaaaaaaaaaaaaaaaaaaaaaaaaaaaaaaaaaaaaaaaaaaaaaaaaaaaaaaaaaaaaaaaaaatctag

SEQ ID NO: 3520 - DNA, 1805 bp, synthetic construct
  misc_feature 1..1805: note = Synthetic
  source 1..1805: mol_type = other DNA
aggactcactatttgttttcgcgcccagttgcaaaaagtgtcgaagctcagaataaacgctcaactttggccggatctgccaccatgggcatccagggcctggccaagctgatcgccgacgtggccccctccgccatccgggagaacgacatcaagtcctacttcggccggaaggtggccatcgacgcctccatgtccatctaccagttcctgatcgccgtgcggcagggcggcgacgtgctgcagaacgaggagggcgagaccacctcccacctgatgggcatgttctaccggaccatccggatgatggagaacggcatcaagcccgtgtacgtgttcgacggcaagcccccccagctgaagtccggcgagctggccaagcggtccgagcggcgggccgaggccgagaagcagctgcagcaggcccaggccgccggcgccgagcaggaggtggagaagttcaccaagcggctggtgaaggtgaccaagcagcacaacgacgagtgcaagcacctgctgtccctgatgggcatcccctacctggacgccccctccgaggccgaggcctcctgcgccgccctggtgaaggccggcaaggtgtacgccgccgccaccgaggacatggactgcctgaccttcggctcccccgtgctgatgcggcacctgaccgcctccgaggccaagaagctgcccatccaggagttccacctgtcccggatcctgcaggagctgggcctgaaccaggagcagttcgtggacctgtgcatcctgctgggctccgactactgcgagtccatccggggcatcggccccaagcgggccgtggacctgatccagaagcacaagtccatcgaggagatcgtgcggcggctggaccccaacaagtaccccgtgcccgagaactggctgcacaaggaggcccaccagctgttcctggagcccgaggtgctggaccccgagtccgtggagctgaagtggtccgagcccaacgaggaggagctgatcaagttcatgtgcggcgagaagcagttctccgaggagcggatccggtccggcgtgaagcggctgtccaagtcccggcagggctccacccagggccggctggacgacttcttcaaggtgaccggctccctgtcctccgccaagcggaaggagcccgagcccaagggctccaccaagaagaaggccaagaccggcgccgccggcaagttcaagcggggcaagtccggcggctccaagcggaccgccgacggctccgagttcgagcccaagaagaagcggaaggtgtagctagcaccagcctcaagaacacccgaatggagtctctaagctacataataccaacttacactttacaaaatgttgtcccccaaaatgtagccattcgtatctgctcctaataaaaagaaagtttcttcacattctctcgagaaaaaaaaaaaatggaaaaaaaaaaaacggaaaaaaaaaaaaggtaaaaaaaaaaaatataaaaaaaaaaaacataaaaaaaaaaaacgaaaaaaaaaaaacgtaaaaaaaaaaaactcaaaaaaaaaaaagataaaaaaaaaaaacctaaaaaaaaaaaatgtaaaaaaaaaaaagggaaaaaaaaaaaacgcaaaaaaaaaaaacacaaaaaaaaaaaatgcaaaaaaaaaaaatcgaaaaaaaaaaaatctaaaaaaaaaaaacgaaaaaaaaaaaacccaaaaaaaaaaaagacaaaaaaaaaaaatagaaaaaaaaaaagttaaaaaaaaaaaactgaaaaaaaaaaaatttaaaaaaaaaaaatctag

SEQ ID NO: 3521 - DNA, 1859 bp, synthetic construct
  misc_feature 1..1859: note = Synthetic
  source 1..1859: mol_type = other DNA
aggaagctcagaataaacgctcaactttggccggatctgccaccatgggcatccagggcctggccaagctgatcgccgacgtggccccctccgccatccgggagaacgacatcaagtcctacttcggccggaaggtggccatcgacgcctccatgtccatctaccagttcctgatcgccgtgcggcagggcggcgacgtgctgcagaacgaggagggcgagaccacctcccacctgatgggcatgttctaccggaccatccggatgatggagaacggcatcaagcccgtgtacgtgttcgacggcaagcccccccagctgaagtccggcgagctggccaagcggtccgagcggcgggccgaggccgagaagcagctgcagcaggcccaggccgccggcgccgagcaggaggtggagaagttcaccaagcggctggtgaaggtgaccaagcagcacaacgacgagtgcaagcacctgctgtccctgatgggcatcccctacctggacgccccctccgaggccgaggcctcctgcgccgccctggtgaaggccggcaaggtgtacgccgccgccaccgaggacatggactgcctgaccttcggctcccccgtgctgatgcggcacctgaccgcctccgaggccaagaagctgcccatccaggagttccacctgtcccggatcctgcaggagctgggcctgaaccaggagcagttcgtggacctgtgcatcctgctgggctccgactactgcgagtccatccggggcatcggccccaagcgggccgtggacctgatccagaagcacaagtccatcgaggagatcgtgcggcggctggaccccaacaagtaccccgtgcccgagaactggctgcacaaggaggcccaccagctgttcctggagcccgaggtgctggaccccgagtccgtggagctgaagtggtccgagcccaacgaggaggagctgatcaagttcatgtgcggcgagaagcagttctccgaggagcggatccggtccggcgtgaagcggctgtccaagtcccggcagggctccacccagggccggctggacgacttcttcaaggtgaccggctccctgtcctccgccaagcggaaggagcccgagcccaagggctccaccaagaagaaggccaagaccggcgccgccggcaagttcaagcggggcaagtccggcggctccaagcggaccgccgacggctccgagttcgagcccaagaagaagcggaaggtgtagctagcaccagcctcaagaacacccgaatggagtctctaagctacataataccaacttacactttacaaaatgttgtcccccaaaatgtagccattcgtatctgctcctaataaaaagaaagtttcttcacattcttgtcagcccagaaccccacacgagttttgccactgctaagctgtgaggcagtgcaggctgggacagccgacctccaggttgcgaaaaacctggtctcgagaaaaaaaaaaaatggaaaaaaaaaaaacggaaaaaaaaaaaaggtaaaaaaaaaaaatataaaaaaaaaaaacataaaaaaaaaaaacgaaaaaaaaaaaacgtaaaaaaaaaaaactcaaaaaaaaaaaagataaaaaaaaaaaacctaaaaaaaaaaaatgtaaaaaaaaaaaagggaaaaaaaaaaaacgcaaaaaaaaaaaacacaaaaaaaaaaaatgcaaaaaaaaaaaatcgaaaaaaaaaaaatctaaaaaaaaaaaacgaaaaaaaaaaaacccaaaaaaaaaaaagacaaaaaaaaaaaatagaaaaaaaaaaagttaaaaaaaaaaaactgaaaaaaaaaaaatttaaaaaaaaaaaatctag

SEQ ID NO: 3522 - DNA, 1899 bp, synthetic construct
  misc_feature 1..1899: note = Synthetic
  source 1..1899: mol_type = other DNA
aggactcactatttgttttcgcgcccagttgcaaaaagtgtcgaagctcagaataaacgctcaactttggccggatctgccaccatgggcatccagggcctggccaagctgatcgccgacgtggccccctccgccatccgggagaacgacatcaagtcctacttcggccggaaggtggccatcgacgcctccatgtccatctaccagttcctgatcgccgtgcggcagggcggcgacgtgctgcagaacgaggagggcgagaccacctcccacctgatgggcatgttctaccggaccatccggatgatggagaacggcatcaagcccgtgtacgtgttcgacggcaagcccccccagctgaagtccggcgagctggccaagcggtccgagcggcgggccgaggccgagaagcagctgcagcaggcccaggccgccggcgccgagcaggaggtggagaagttcaccaagcggctggtgaaggtgaccaagcagcacaacgacgagtgcaagcacctgctgtccctgatgggcatcccctacctggacgccccctccgaggccgaggcctcctgcgccgccctggtgaaggccggcaaggtgtacgccgccgccaccgaggacatggactgcctgaccttcggctcccccgtgctgatgcggcacctgaccgcctccgaggccaagaagctgcccatccaggagttccacctgtcccggatcctgcaggagctgggcctgaaccaggagcagttcgtggacctgtgcatcctgctgggctccgactactgcgagtccatccggggcatcggccccaagcgggccgtggacctgatccagaagcacaagtccatcgaggagatcgtgcggcggctggaccccaacaagtaccccgtgcccgagaactggctgcacaaggaggcccaccagctgttcctggagcccgaggtgctggaccccgagtccgtggagctgaagtggtccgagcccaacgaggaggagctgatcaagttcatgtgcggcgagaagcagttctccgaggagcggatccggtccggcgtgaagcggctgtccaagtcccggcagggctccacccagggccggctggacgacttcttcaaggtgaccggctccctgtcctccgccaagcggaaggagcccgagcccaagggctccaccaagaagaaggccaagaccggcgccgccggcaagttcaagcggggcaagtccggcggctccaagcggaccgccgacggctccgagttcgagcccaagaagaagcggaaggtgtagctagcaccagcctcaagaacacccgaatggagtctctaagctacataataccaacttacactttacaaaatgttgtcccccaaaatgtagccattcgtatctgctcctaataaaaagaaagtttcttcacattcttgtcagcccagaaccccacacgagttttgccactgctaagctgtgaggcagtgcaggctgggacagccgacctccaggttgcgaaaaacctggtctcgagaaaaaaaaaaaatggaaaaaaaaaaaacggaaaaaaaaaaaaggtaaaaaaaaaaaatataaaaaaaaaaaacataaaaaaaaaaaacgaaaaaaaaaaaacgtaaaaaaaaaaaactcaaaaaaaaaaaagataaaaaaaaaaaacctaaaaaaaaaaaatgtaaaaaaaaaaaagggaaaaaaaaaaaacgcaaaaaaaaaaaacacaaaaaaaaaaaatgcaaaaaaaaaaaatcgaaaaaaaaaaaatctaaaaaaaaaaaacgaaaaaaaaaaaacccaaaaaaaaaaaagacaaaaaaaaaaaatagaaaaaaaaaaagttaaaaaaaaaaaactgaaaaaaaaaaaatttaaaaaaaaaaaatctag

SEQ ID NO: 3523 - DNA, 2241 bp, synthetic construct; identical to SEQ ID NO: 3509
  misc_feature 1..2241: note = Synthetic
  source 1..2241: mol_type = other DNA

SEQ ID NO: 3524 - DNA, 2241 bp, synthetic construct; identical to SEQ ID NO: 3509
  misc_feature 1..2241: note = Synthetic
  source 1..2241: mol_type = other DNA

SEQ ID NO: 3525 - DNA, 1827 bp, synthetic construct; identical to SEQ ID NO: 3510
  misc_feature 1..1827: note = Synthetic
  source 1..1827: mol_type = other DNA

SEQ ID NO: 3526 - DNA, 2223 bp, synthetic construct; identical to SEQ ID NO: 3512
  misc_feature 1..2223: note = Synthetic
  source 1..2223: mol_type = other DNA

SEQ ID NO: 3527 - DNA, 2223 bp, synthetic construct; identical to SEQ ID NO: 3512
  misc_feature 1..2223: note = Synthetic
  source 1..2223: mol_type = other DNA

SEQ ID NO: 3528 - DNA, 2241 bp, synthetic construct; identical to SEQ ID NO: 3514
  misc_feature 1..2241: note = Synthetic
  source 1..2241: mol_type = other DNA

SEQ ID NO: 3529 - DNA, 2241 bp, synthetic construct; identical to SEQ ID NO: 3514
  misc_feature 1..2241: note = Synthetic
  source 1..2241: mol_type = other DNA

SEQ ID NO: 3530 - DNA, 951 bp, synthetic construct; identical to SEQ ID NO: 3515
  misc_feature 1..951: note = Synthetic
  source 1..951: mol_type = other DNA
